(19) United States
(12) Patent Application Publication
(10) Pub. No.: US 2024/0026322 A1
(43) Pub. Date: Jan. 25, 2024

(54) NOVEL NUCLEIC ACID-GUIDED NUCLEASES

(71) Applicant: GigaMune, Inc., San Francisco, CA (US)

(72) Inventors: David Scott JOHNSON, San Francisco, CA (US); Jan Fredrik SIMONS, San Francisco, CA (US); Yoong Wearn LIM, Pacifica, CA (US); Matthew James SPINDLER, San Francisco, CA (US); Kyle Pierce CARTER, Brisbane, CA (US); Savreet Kaur SANDHU, San Francisco, CA (US); Ellen Kathleen WAGNER, San Francisco, CA (US); Garry Coles, San Mateo, CA (US); Robert EDGAR, Corte Madera, CA (US)

(21) Appl. No.: 18/336,922

(22) Filed: Jun. 16, 2023

Related U.S. Application Data
(63) Continuation of application No. PCT/US21/65554, filed on Dec. 29, 2021.
(60) Provisional application No. 63/133,089, filed on Dec. 31, 2020.

(51) Int. Cl. C12N 9/22; C12N 15/63; C12N 15/10

(52) U.S. Cl. CPC C12N 9/22; C12N 15/63; C12N 15/102; C07K 2319/09; C12N 2310/20

(57) ABSTRACT

The present disclosure provides novel nucleic acid-guided nucleases and methods of using the nucleases for genome editing. The present disclosure further provides a system for editing a target region in a genome comprising a nucleic acid-guided nuclease, a heterologous guide nucleic acid for complexing with the nucleic acid-guided nuclease, and an editing polynucleotide configured to bind to the target region.

### 1. REFERENCE TO RELATED APPLICATIONS

[0001] This application is a bypass continuation of International Application PCT/US2021/065554, filed Dec. 29, 2021, which claims the benefit of U.S. Provisional Application No. 63/133,089 filed on Dec. 31, 2020, the disclosures of which are hereby incorporated by reference in their entirety.

### 2. SEQUENCE LISTING

[0002] The instant application contains a Sequence Listing which has been submitted via EFS-Web and is hereby incorporated by reference in its entirety. Said ASCII copy, created on Dec. 21, 2021, is named sequence_listing_20211221.TXT and is 3,733,225 bytes in size.

### 3. BACKGROUND

[0003] The CRISPR (clustered regularly interspaced short palindromic repeats)-Cas9 system allows targeted alteration of genomic sequences in living cells, making possible ex vivo and in vivo gene editing therapies through targeted nonhomologous end-joining and homology-directed repair. In addition to the canonical Cas9 nuclease family, additional nucleic acid-guided nuclease families have been discovered, including CasX, Cpf1/Cas12a (which includes MAD7), Cas12b, Cas12c, and Cas13.

[0004] However, nucleases available in the art have limitations, such as difficulties in purification on a large scale for use in genome engineering or other applications, and challenges in delivery due to their sizes. They have further limitations related to their specificity, processivity, genome editing efficiency, and genome targeting limitations imposed by PAM recognition sequences.

[0005] Therefore, there is a need for additional nucleic acid-guided nucleases that provide additional or improved targeting functionality and/or improved function, as compared to enzymes in the Cas9 family. Further, development of various genome editing tools is desired to provide an option to choose an optimal tool for specific application and purposes.

### 4. SUMMARY

[0006] The present disclosure provides novel nucleic acid-guided nucleases and methods of using the nucleases for genome editing. The new genome editing tools provided herein are expected to increase flexibility in applying genome editing technologies, because each nuclease has unique characteristics, which can affect target recognition specificity and genetic editing efficiency. Further, the nucleases have desired properties in terms of their genome editing efficiency and specificity. These benefits are important for applications in biomedical research, agriculture, human gene therapy, human cell therapy, and diagnostics, and many other commercial and industrial applications.

[0007] Accordingly, one aspect of the present disclosure provides an engineered, non-naturally occurring targetable nuclease system comprising: (a) nucleic acid-guided nuclease, comprising a nuclease polypeptide having at least 95% sequence identity to a sequence selected from SEQ ID NO: 2-273, and (b) at least one engineered guide polynucleotide designed to form a complex with the nuclease and comprising a guide sequence, wherein the guide sequence is designed to hybridize with a target sequence in a eukaryotic cell, and (c) the complex of the nuclease and the guide polynucleotide do not naturally occur.

[0008] In some embodiments, the nuclease polypeptide has at least 96%, 97%, 98%, 99%, or 100% sequence identity to a sequence selected from SEQ ID NO: 2-273. In some embodiments, the nuclease polypeptide has less than 100% sequence identity to SEQ ID NO: 2-273. In some embodiments, the nuclease polypeptide has at least 95%, 96%, 97%, 98%, 99%, or 100% sequence identity to a sequence selected from SEQ ID NO: 123, 116, 146, 43, 254, and 175. In some embodiments, the nuclease polypeptide has at least 95%, 96%, 97%, 98%, 99%, or 100% sequence identity to a sequence selected from SEQ ID NO: 123, 146, 254, and 175.

[0009] In some embodiments, the nuclease polypeptide comprises a sequence selected from SEQ ID NO: 815-822. In some embodiments, the nuclease polypeptide comprises sequences of SEQ ID NO: 815-822

[0010] In some embodiments, the nuclease polypeptide has at least 95%, 96%, 97%, 98%, 99%, or 100% sequence identity to a sequence selected from SEQ ID NO: 116 and 43.

[0011] In some embodiments, the nuclease polypeptide comprises a sequence of SEQ ID NO: 123. In some embodiments, the nuclease polypeptide comprises a sequence of SEQ ID NO: 116. In some embodiments, the nuclease polypeptide comprises a sequence of SEQ ID NO: 146. In some embodiments, the nuclease polypeptide comprises a sequence of SEQ ID NO: 32. In some embodiments, the nuclease polypeptide comprises a sequence of SEQ ID NO: 254. In some embodiments, the nuclease polypeptide comprises a sequence of SEQ ID NO: 175.

[0012] In some embodiments, the nuclease polypeptide is fused to a fusion peptide. In some embodiments, the fusion peptide is a signal peptide fused in-frame to the nuclease polypeptide. In some embodiments, the fusion peptide is a nuclear localization sequence fused to the nuclease polypeptide. In some embodiments, the nuclear localization sequence has a sequence selected from SEQ ID NO: 628-631.

[0013] In some embodiments, the nuclease polypeptide is originated from Acidaminococcus massiliensis, Acidaminococcus sp., Acinetobacter indicus, Agathobacter rectalis, Anaerovibrio lipolyticus, Bacteroidales bacterium, Bacteroides galacturonicus, Bacteroides plebeius, Bacteroidetes bacterium, Butyrivibrio fibrisolvens, Butyrivibrio hungatei, Butyrivibrio sp., Candidatus Falkowbacteria bacterium, Candidatus Falkowbacteria bacterium, Candidatus Gottesmanbacteria bacterium, Candidatus Jacksonbacteria bacterium, Candidatus Magasanikbacteria bacterium, Candidatus Moranbacteria bacterium, Candidatus Pacebacteria bacterium, Candidatus Roizmanbacteria bacterium, Candidatus Ryanbacteria bacterium, Candidatus Saccharibacteria bacterium, Candidatus Sungbacteria bacterium, Candidatus Uhrbacteria bacterium, Candidatus Wildermuthbacteria bacterium, Candidatus Yonathbacteria bacterium, Catenovulum sp., Clostridiales bacterium, Clostridium sp., Coprococcus eutactus, Coprococcus sp., Deltaproteobacteria bacterium, Elizabethkingia sp., Eubacteriaceae bacterium, Eubacterium eligens, Eubacterium rectale, Eubacterium sp., Eubacterium ventriosum, Fibrobacter sp., Fibrobacter succinogenes, Firmicutes bacterium, Flavobacterium branchiophilum, Francisella hispaniensis, Francisella novicida, Francisella philomiragia, Francisella tularensis, Lachnospiraceae bacterium, Lachnospira pectinoschiza, Lentisphaeria bacterium, Leptospiraceae bacterium, Leptospira sp., Moraxella bovis, Moraxella bovoculi, Moraxella lacunata, Moraxella ovis, Moraxella sp., Muribaculaceae bacterium, Patescibacteria group bacterium, Phycisphaerae bacterium, Phycisphaerales bacterium, Porphyromonadaceae bacterium, Porphyromonas crevioricanis, Prevotella brevis, Prevotellaceae bacterium, Prevotella copri, Prevotellamassilia sp., Prevotella ruminicola, Prevotella sp., Prolixibacteraceae bacterium, Pseudobutyrivibrio sp., Pseudobutyrivibrio xylanivorans, Psychrobacter sp., Ruminococcaceae bacterium, Ruminococcus sp., Sedimentisphaera cyanobacteriorum, Sneathia amnii, Spirochaetia bacterium, Succinivibrionaceae bacterium, or Treponema sp.

[0014] In another aspect, the present disclosure provides a polynucleotide comprising a first polynucleotide segment encoding the nucleic acid-guided nuclease having at least 95% sequence identity to a sequence selected from SEQ ID NO: 2-273.

[0015] In some embodiments, the polynucleotide further comprises a second polynucleotide segment encoding a fusion peptide.

[0016] In some embodiments, the first polynucleotide segment has been codon optimized for expression in mammalian cells. In some embodiments, the first polynucleotide segment has been codon optimized for expression in human cells.

[0017] In some embodiments, the first polynucleotide segment has a sequence having at least 95%, 96%, 97%, 98%, or 99% sequence identity to a sequence selected from SEQ ID NO: 722-766. In some embodiments, the first polynucleotide segment has a sequence selected from SEQ ID NO: 722-766. In some embodiments, the polynucleotide further comprises the sequence selected from SEQ ID NO: 767-811.

[0018] In some embodiments, the first polynucleotide segment has been codon optimized for expression in bacterial cells. In some embodiments, the polynucleotide comprises the sequence selected from SEQ ID NO: 632-676.

[0019] In some embodiments, the first polynucleotide segment has a sequence selected from SEQ ID NO: 677-721.

[0020] In yet another aspect, the present disclosure provides a vector encoding the nucleic acid-guided nuclease, comprising the polynucleotide of any one of claims 20-29.

[0021] In some embodiments, the vector further comprises a promoter operably linked to the polynucleotide encoding the nucleic acid-guided nuclease.

[0022] In one aspect, the present disclosure provides a host cell comprising the polynucleotide provided herein or the vector provided herein.

[0023] One aspect of the present disclosure provides a method of generating a nucleic acid-guided nuclease comprising the steps of: culturing the host cell described herein, and isolating the nucleic acid-guided nuclease from the host cell culture.

[0024] In one aspect, the present disclosure provides a method of modifying a target region of a eukaryotic or prokaryotic genome, comprising the steps of: contacting a sample comprising the target region with a nucleic acid-guided nuclease having at least 90% sequence identity to a sequence selected from the group consisting of SEQ ID NO: 2-273, and a guide nucleic acid complexed with the nucleic acid-guided nuclease, and allowing the nucleic acid-guided nuclease to modify the target region.

[0025] In some embodiments, the contacting step is performed further in the presence of a homology template configured to bind to the target region.

[0026] In some embodiments, the guide nucleic acid is a heterologous guide nucleic acid.

[0027] In some embodiments, the nucleic acid-guided nuclease is originated from Acidaminococcus massiliensis, Acidaminococcus sp., Acinetobacter indicus, Agathobacter rectalis, Anaerovibrio lipolyticus, Bacteroidales bacterium, Bacteroides galacturonicus, Bacteroides plebeius, Bacteroidetes bacterium, Butyrivibrio fibrisolvens, Butyrivibrio hungatei, Butyrivibrio sp., Candidatus Falkowbacteria bacterium, Candidatus Falkowbacteria bacterium, Candidatus Gottesmanbacteria bacterium, Candidatus Jacksonbacteria bacterium, Candidatus Magasanikbacteria bacterium, Candidatus Moranbacteria bacterium, Candidatus Pacebacteria bacterium, Candidatus Roizmanbacteria bacterium, Candidatus Ryanbacteria bacterium, Candidatus Saccharibacteria bacterium, Candidatus Sungbacteria bacterium, Candidatus Uhrbacteria bacterium, Candidatus Wildermuthbacteria bacterium, Candidatus Yonathbacteria bacterium, Catenovulum sp., Clostridiales bacterium, Clostridium sp., Coprococcus eutactus, Coprococcus sp., Deltaproteobacteria bacterium, Elizabethkingia sp., Eubacteriaceae bacterium, Eubacterium eligens, Eubacterium rectale, Eubacterium sp., Eubacterium ventriosum, Fibrobacter sp., Fibrobacter succinogenes, Firmicutes bacterium, Flavobacterium branchiophilum, Francisella hispaniensis, Francisella novicida, Francisella philomiragia, Francisella tularensis, Lachnospiraceae bacterium, Lachnospira pectinoschiza, Lentisphaeria bacterium, Leptospiraceae bacterium, Leptospira sp., Moraxella bovis, Moraxella bovoculi, Moraxella lacunata, Moraxella ovis, Moraxella sp., Muribaculaceae bacterium, Patescibacteria group bacterium, Phycisphaerae bacterium, Phycisphaerales bacterium, Porphyromonadaceae bacterium, Porphyromonas crevioricanis, Prevotella brevis, Prevotellaceae bacterium, Prevotella copri, Prevotellamassilia sp., Prevotella ruminicola, Prevotella sp., Prolixibacteraceae bacterium, Pseudobutyrivibrio sp., Pseudobutyrivibrio xylanivorans, Psychrobacter sp., Ruminococcaceae bacterium, Ruminococcus sp., Sedimentisphaera cyanobacteriorum, Sneathia amnii, Spirochaetia bacterium, Succinivibrionaceae bacterium, or Treponema sp.

[0028] In some embodiments, the nucleic acid-guided nuclease has at least 95%, 96%, 97%, 98%, 99% or 100% identity to a sequence selected from SEQ ID NO: 2-273. In some embodiments, the nuclease polypeptide has at least 95%, 96%, 97%, 98%, 99%, or 100% sequence identity to a sequence selected from SEQ ID NO: 123, 116, 146, 43, 254, and 175.

[0029] In some embodiments, the nuclease polypeptide has at least 95%, 96%, 97%, 98%, 99%, or 100% sequence identity to a sequence selected from SEQ ID NO: 123, 146, 254, and 175.

[0030] In some embodiments, the nuclease polypeptide comprises a sequence selected from SEQ ID NO: 815-822. In some embodiments, the nuclease polypeptide comprises sequences of SEQ ID NO: 815-822.

[0031] In some embodiments, the nuclease polypeptide has at least 95%, 96%, 97%, 98%, 99%, or 100% sequence identity to a sequence selected from SEQ ID NO: 116 and 43. In some embodiments, the nuclease polypeptide comprises a sequence selected from 123, 116, 146, 32, 254, 275, and 175.

[0032] In some embodiments, the sample comprises a eukaryotic cell. In some embodiments, the sample comprises a bacterial cell. In some embodiments, the sample comprises a plant cell. In some embodiments, the sample comprises a mammalian cell. In some embodiments, the sample comprises an immune cell. In some embodiments, the immune cell is a B cell or T cell.

[0033] In some embodiments, a T cell receptor is engineered into the genome. In some embodiments, an endogenous T cell receptor is disrupted. In some embodiments, a T cell receptor is engineered into the genome and an endogenous T cell receptor is disrupted.

[0034] In some embodiments, the homology template includes a sequence complementary to the target region. In some embodiments, the homology template includes an insertion, deletion, or modification compared to the target region.

[0035] In some embodiments, the guide nucleic acid is an engineered, non-naturally occurring polynucleotide. In some embodiments, the guide nucleic acid and the homology template form a single polynucleotide.

[0036] In another aspect, the present disclosure provides a cell, tissue or organism comprising a genome modified by the method of the present disclosure.

### 5. BRIEF DESCRIPTION OF THE DRAWINGS

[0037] FIG. 1. Histogram showing amino acid percent identity to MAD7 for novel Cas enzymes (SEQ IDS 2-273), which we refer to as the “GIG-” nucleases or “GIG-” enzymes, identified in a sequence search of 134,655 prokaryotic genomes in the NCBI Genbank database.

[0038] FIG. 2. Sequence tree showing the relationship among the novel GIG-Cas enzymes (SEQ IDS 2-273) identified in a sequence search of 134,655 prokaryotic genomes in the NCBI Genbank database.

[0039] FIG. 3. Sequence logo summarizing crRNA CRISPR repeats (SEQ IDS 274-627) in the genomic vicinity of the novel GIG-Cas enzymes (SEQ IDS 2-273) identified in a sequence search of 134,655 prokaryotic genomes in the NCBI Genbank database.

[0040] FIG. 4. Vector map of T7p14 DNA construct for in vitro transcription and translation (SEQ ID NO: 814).

[0041] FIGS. 5A-5C. Functional assessment of novel GIG-Cas enzymes through an in vitro GFP reporter assay. FIG. 5A: GIG-1 (SEQ ID NO: 123) and GIG-2 (SEQ ID NO: 43);

[0042] FIG. 5B: GIG-4 (SEQ ID NO: 254) and GIG-5 (SEQ ID NO: 28); FIG. 5C: GIG-3 (SEQ ID NO: 79). Abscissa: incubation time, each cycle corresponds to 10 min for a total of 18 h Ordinate: GFP relative fluorescence signal (excitation/emission: 485/520 nm, resp).

[0043] FIG. 6. Heatmap of PAM activities of the GIG-Cas enzymes, identified using the in vitro screening system of Maxwell et al. (Methods, 2018).

[0044] FIGS. 7A-7D. PAM sequence motifs that function with novel GIG or other Cas enzymes, identified using the in vitro screening system of Maxwell et al. (Methods, 2018).

[0045] FIG. 8. Vector map of pET21 construct for bacterial expression (SEQ ID NO: 812).

[0046] FIG. 9. SDS-PAGE analysis of purified recombinant GIG nucleases (GIG-1, GIG-2, GIG-5, GIG-10, GIG-12, GIG-15, GIG-16, and GIG-17). 1 μg of each protein was loaded on 4-20% gel. (H) samples were purified by His-purification; (C) samples were CEX purified following His-purification.

[0047] FIGS. 10A-10C. SE-HPLC analysis of purified GIG-Cas nucleases (GIG-1, GIG-2, GIG-5, GIG-10, GIG-12, GIG-15, GIG-16 and GIG-17) following His and CEX purification.

[0048] FIG. 10A: AsCas12a, MAD7, GIG-1 and GIG-2; FIG. 10B: GIG-5, GIG-10, GIG-12 and GIG-15; FIG. 10C: GIG-16 and GIG-17.

[0049] FIG. 11. Knockdown and HDR Efficiency of selected GIG nucleases at the human TRAC locus in Jurkat cells. Cells were electroporated with the RNPs consisting of the indicated nuclease and TRAC-targeting sgRNA (GR-31, GR-40, and GR-42). As a negative control, RNP consisting of AsCas12a and a scrambled sgRNA was also electroporated. Additionally, each sample was also electroporated with a homology-directed repair (HDR) template for GFP expression. Cells were stained with fluorescently-conjugated antibodies for CD3 and TCRαβ and analyzed by flow cytometry 5 days after electroporation. Higher knockdown efficiency indicates lower expression levels of CD3 and TCRαβ. Cells that successfully incorporated the HDR template express GFP.

[0050] FIG. 12. Knockdown and HDR Efficiency of selected GIG nucleases at the human TRAC locus in Jurkat cells. Cells were electroporated with RNPs consisting of the indicated nuclease and TRAC-targeting sgRNA, as well as an HDR template for GFP expression. As a negative control, RNPs were electroporated without the HDR template. Cells were stained with fluorescently-conjugated antibodies for CD3 and TCRαβ and analyzed by flow cytometry 5 days after electroporation. Higher knockdown efficiency indicates lower expression levels of CD3 and TCRαβ. Cells that successfully incorporated the HDR template express GFP.

[0051] FIG. 13. Knockdown efficiency of AsCas12a and GIG-17 nucleases at the human B2M locus in Jurkat cells. Cells were electroporated with RNPs consisting of the indicated nuclease and three unique B2M-targeting sgRNAs (GR-44, GR-45, GR-46). Cells were stained with fluorescently-conjugated antibody for HLA-A, B, C and analyzed by flow cytometry 5 days after electroporation. Higher knockdown efficiency indicates higher levels of B2M deficient cells.

[0052] FIG. 14. Knockdown efficiency of AsCas12a and GIG-17 nucleases at the human HLA-A*02:01 locus in T2 cells. Cells were electroporated with RNPs consisting of the indicated nuclease and three unique HLA-A*02:01-targeting sgRNAs (GR-71, GR-72 or GR-73). Cells were stained with a fluorescently-conjugated antibody for HLA-A2 and analyzed by flow cytometry 5 days after electroporation. Higher knockdown efficiency indicates higher levels of HLA-A2 deficient cells.

[0053] FIG. 15. Vector map of pReceiver lentiviral construct for mammalian expression (SEQ ID 813).

[0054] The figures depict various embodiments of the present invention for purposes of illustration only. One skilled in the art will readily recognize from the following discussion that alternative embodiments of the structures and methods illustrated herein can be employed without departing from the principles of the invention described herein.

### 6. DETAILED DESCRIPTION

### 6.1. Definitions

[0055] Unless defined otherwise, all technical and scientific terms used herein have the meaning commonly understood by one of ordinary skill in the art to which the invention pertains. As used herein, the following terms have the meanings ascribed to them below.

[0056] The term “heterologous guide nucleic acid” as used herein refers to a guide nucleic acid that is capable of complexing with a nucleic acid-guided nuclease to form a ribonucleic acid particle (RNP), wherein the RNP does not exist in nature.

[0057] The term “compatible” as used herein refers to a guide nucleic acid and nucleic-acid guided nuclease that are capable of complexing to form an RNP that functions as a targeted nuclease complex.

[0058] The terms “variant” or “mutant” as used herein refers to a biological material (e.g., protein, polynucleotide, etc.) exhibiting qualities that deviates from what occurs in nature.

[0059] For example, a variant or mutant can be a polypeptide having a mutation from a wild type polypeptide at one or more amino acids, or which contains addition, deletion or substitution of one or more amino acids.

[0060] The terms “crRNA”, “gRNA” and “guide RNA” are used interchangeably as described elsewhere, e.g., PCT/US2013/074667. In general, gRNA is a polynucleotide sequence having sufficient complementarity with a target polynucleotide sequence to hybridize with the target sequence and direct sequence-specific binding of a CRISPR complex to the target sequence. In some embodiments, the degree of complementarity between a guide sequence and its corresponding target sequence is about or more than 50%, 60%, 70%, 80%, 90%, 95%, 99%, or more.

[0061] The practice of the present invention employs, unless otherwise indicated, conventional techniques of immunology, biochemistry, chemistry, molecular biology, microbiology, cell biology, genomics, recombinant DNA, which are well known for those will skill in the art. See Green and Sambrook (Molecular Cloning: A Laboratory Manual), Current Protocols in Molecular Biology (Ausubel, et al., eds.), Antibodies: a Laboratory Manual (Harlow & Taylor, eds.).

### 6.2. Other Interpretational Conventions

[0062] Ranges recited herein are understood to be shorthand for all of the values within the range, inclusive of the recited endpoints. For example, a range of 1 to 50 is understood to include any number, combination of numbers, or sub-range from the group consisting of 1, 2, 3, 4, 5, 6, 7, 8, 9, 10, 11, 12, 13, 14, 15, 16, 17, 18, 19, 20, 21, 22, 23, 24, 25, 26, 27, 28, 29, 30, 31, 32, 33, 34, 35, 36, 37, 38, 39, 40, 41, 42, 43, 44, 45, 46, 47, 48, 49, and 50.

### 6.3. Nucleic Acid-Guided Nucleases

[0063] In a first aspect, a nucleic acid-guided nuclease is provided. The nucleases are functional in prokaryotic and eukaryotic cells and are useful for in vitro, ex vivo, and in vivo genome editing applications. In some embodiments, the nucleic acid-guided nucleases are naturally occurring. In some embodiments, the nucleic acid-guided nucleases are non-naturally occurring. In certain embodiments, the non-naturally occurring nuclease is an engineered nuclease. In some embodiments, the nucleic acid-guided nucleases are purified proteins.

[0064] In some embodiments, nucleic acid guided nucleases are part of a “targetable nuclease system” comprising a nucleic acid guided nuclease and a guide nucleic acid. A targetable nuclease system can be used to bind, cleave, modify, and/or edit a target polynucleotide sequence, often referred to as a “target sequence”. Methods, systems, vectors, polynucleotides, and compositions described herein may be used in various applications including altering or modifying synthesis of a gene product, such as a protein, polynucleotide cleavage, polynucleotide editing, polynucleotide splicing, trafficking of target polynucleotide, isolation of target polynucleotide, visualization of target polynucleotide, etc. Aspects of the current invention also include methods and uses of the compositions and systems described herein in “genome engineering”, defined as altering or manipulating the expression of one or more gene products in prokaryotic, archaeal, or eukaryotic cells in vitro, in vivo, or ex vivo. For example, use of nucleic acid guided nucleases are described in U.S. Pat. No. 10,011,849, incorporated by reference in its entirety herein.

### 6.3.1. Nucleases

[0065] The present disclosure provides novel naturally and non-naturally occurring nucleic acid-guided nucleases. In some embodiments, suitable nucleic acid-guided nucleases are obtained from an organism from a genus which includes but is not limited to: Moraxella, Acidaminococcus, Francisella, Lachnospira, Butyrivibrio, Clostridium, Coprococcus, Prevotella, Flavobacterium, Eubacterium, Sedimentisphaera, Limihaloglobus, Pseudobutyrivibrio, Anaerovibrio, Psychrobacter, Acinetobacter, Catenovulum, Bacteroides, Ruminococcus, Porphyromonas, Elizabethkingia, and Prevotellamassilia. In some embodiments, the nucleic-acid guided nucleases are a variant or a modification of a naturally occurring nuclease.

[0066] In some embodiments, the novel nucleases comprise less than 95%, 90%, 80%, 70%, 60%, 50%, 40%, 30%, or 20% sequence identity to any previously disclosed Cpf1, Cas12a, and MAD7 enzymes. Further, nucleases provided herein are different from the Cpf1, Cas12a, and MAD7 enzymes known in the art. For example, endonucleases of the present disclosure have a sequence different from the sequences disclosed in U.S. Pat. No. 9,790,490B2. In some embodiments, the novel nuclease of the present disclosure comprises less than 95%, 90%, 80%, 70%, 60%, 50% or 40% sequence identity to any of the sequences disclosed in U.S. Pat. No. 9,790,490B2. U.S. Pat. No. 9,790,490B2 and sequences disclosed therein are incorporated by reference in their entireties herein.

[0067] The term “orthologue” or “homologue” as used herein refers to a protein having a sequence having at least 80%, or preferably at least 85%, sequence identity, when aligned with a suitable sequence alignment algorithm. On average, the novel nucleases reported herein has only about 38% sequence identity to previously reported Cpf1 sequences of subtype V-A (see U.S. Pat. No. 9,790,490B2) (FIG. 1). So, most nucleases reported in the present disclosures do not have a previously known homologue.

[0068] In some embodiments, the nuclease is obtained from a bacterial genomic locus for a gene selected from the families cas1, cas2, and cpf1 and a CRISPR array. In some embodiments, Cpf1 or Cpf1-like peptide sequences are originated from organisms of the genera Corynebacter, Sutterella, Legionella, Treponema, Filifactor, Eubacterium, Streptococcus, Lactobacillus, Mycoplasma, Bacteroides, Flaviivola, Flavobacterium, Sphaerochaeta, Azospirillum, Glucomacetobacter, Neiserria, Roseburia, Parvibaculum, Staphylococcus, Nitratifractor, Mycoplasma, or Campylobacter. In some embodiments, Cpf1 or Cpf1-like peptide sequences are originated from organisms other than the genera Corynebacter, Sutterella, Legionella, Treponema, Filifactor, Eubacterium, Streptococcus, Lactobacillus, Mycoplasma, Bacteroides, Flaviivola, Flavobacterium, Sphaerochaeta, Azospirillum, Glucomacetobacter, Neiserria, Roseburia, Parvibaculum, Staphylococcus, Nitratifractor, Mycoplasma, or Campylobacter.

[0069] In some embodiments, the nucleic acid-guided nuclease of the present disclosure comprises a nuclease polypeptide. The nuclease polypeptide is a polypeptide having a sequence selected from SEQ ID NO: 2-273. In some embodiments, the nuclease polypeptide is a polypeptide having less than 100% sequence identity to a sequence selected from SEQ ID NO: 2-273. In some embodiments, the nuclease polypeptide has at least 96%, 97%, 98%, or 99% sequence identity to a sequence selected from SEQ ID NO: 2-273. In some embodiments, the nuclease polypeptide has at least 95%, 96%, 97%, 98%, 99%, or 100% sequence identity to a sequence selected from SEQ ID NO: 123, 116, 146, 43, 254, and 175.

[0070] In some embodiments, the nuclease polypeptide is in cluster 1 described in Example 1 and FIG. 2. In some embodiments, the nuclease polypeptide comprises a sequence selected from SEQ ID Nos: 188, 204, 221, 256, 240, 233, 189, 202, 185, 247, 191, 201, 246, 81, 83, 243, 88, 258, 223, 131, 214, 226, 85, 231, 79, 80, 217, 238, 87, 254, 248, 241, 242, 65, 94, 95, 143, 176, 17, 169, 165, 160, 172, 157, 166, 163, 10, 16, 122, 126, 139, 144, 145, 23, 155, 123, 137, 138, 18, 48, 125, 127, 128, 135, 136, 150, 153, 1, 59, 15, 134, 171, 32, 175, 184, 159, 156, 199, 147, 146, 149, 154, 148, 198, 60, 120, 19, 197, 161, 173, 174, 50, 49, 196, 5, 130, 3, 200, 74, 97, 177, 33, 41, and 86.

[0071] In some embodiments, the nuclease polypeptide is in cluster 2 described in Example 1 and FIG. 2. In some embodiments, the nuclease polypeptide comprises a sequence selected from SEQ ID Nos: 228, 236, and 8.

[0072] In some embodiments, the nuclease polypeptide is in cluster 3 described in Example 1 and FIG. 2. In some embodiments, the nuclease polypeptide comprises a sequence selected from SEQ ID Nos: 245 and 272.

[0073] In some embodiments, the nuclease polypeptide is in cluster 4 described in Example 1 and FIG. 2. In some embodiments, the nuclease polypeptide comprises a sequence selected from SEQ ID Nos: 101, 102, 69, 212, 255, 237, 207, 216, 235, 227, 229, 70, 105, and 170.

[0074] In some embodiments, the nuclease polypeptide is in cluster 5 described in Example 1 and FIG. 2. In some embodiments, the nuclease polypeptide comprises a sequence selected from SEQ ID Nos: 110, 113, 111, 73, 66, 54, 55, 112, 75, 106, 109, 108, 53, 118, 100, 103, 114, 56, 67, and 162.

[0075] In some embodiments, the nuclease polypeptide is in cluster 6 described in Example 1 and FIG. 2. In some embodiments, the nuclease polypeptide comprises a sequence selected from SEQ ID Nos: 104, 107, 260, 253, 91, 99, 92, 262, and 271.

[0076] In some embodiments, the nuclease polypeptide is in cluster 7 described in Example 1 and FIG. 2. In some embodiments, the nuclease polypeptide comprises a sequence selected from SEQ ID Nos: 269, 220, 225, 266, and 186.

[0077] In some embodiments, the nuclease polypeptide is in cluster 8 described in Example 1 and FIG. 2. In some embodiments, the nuclease polypeptide comprises a sequence selected from SEQ ID Nos: 194, 203, 115, 211, 273, and 249.

[0078] In some embodiments, the nuclease polypeptide is in cluster 9 described in Example 1 and FIG. 2. In some embodiments, the nuclease polypeptide comprises a sequence selected from SEQ ID Nos: 132, 133, 124, 152, 151, 72, 206, 24, 25, 68, 195, 232, 30, 12, 182, 252, 259, 222, 251, 190, 209, 239, 250, 192, 205, 71, 76, 215, 93, 264, 208, 267, 183, 265, 193, 210, 89, 263, 268, 270, 213, 224, 218, 257, 36, 178, 187, and 244.

[0079] In some embodiments, the nuclease polypeptide is in cluster 10 described in Example 1 and FIG. 2. In some embodiments, the nuclease polypeptide comprises a sequence selected from SEQ ID Nos: 158, 230, 234, 140, 164, 142, 141, 180, 77, 78, 167, 13, 35, and 179.

[0080] In some embodiments, the nuclease polypeptide is in cluster 11 described in Example 1 and FIG. 2. In some embodiments, the nuclease polypeptide comprises a sequence selected from SEQ ID Nos: 62, 121, 61, 82, 4, 29, 39, 117, 58, 57, 40, 27, 7, 6, 31, 9, 28, 38, 37, 26, 34, 129, 96, 181, 168, 47, 261, 2, 46, 22, 63, 42, 44, 43, 45, 20, 51, 52, 64, 11, 84, 116, 21, 14, and 119.

[0081] In some embodiments, the nuclease polypeptide is in cluster 12 described in Example 1 and FIG. 2. In some embodiments, the nuclease polypeptide comprises a sequence selected from SEQ ID Nos: 219 and 90.

[0082] In some embodiments, the nuclease polypeptide is in cluster 3, 4, 5, 6, 7, 8, 9, or 10 described in Example 1 and FIG. 2.

[0083] In some embodiments, the nuclease polypeptide is not in cluster 1 described in Example 1 and FIG. 2. In some embodiments, the nuclease polypeptide is not in cluster 2 described in Example 1 and FIG. 2. In some embodiments, the nuclease polypeptide is not in cluster 3, 4, 5, 6, 7, 8, 9, or 10 described in Example 1 and FIG. 2. In some embodiments, the nuclease polypeptide is not in cluster 11 described in Example 1 and FIG. 2.

[0084] In some embodiments, the nuclease polypeptide comprises a conserved peptide sequence identified through a multiple sequence alignment of nucleases which are putatively evolutionarily related. In some embodiments, the nuclease polypeptide comprises one or more of the conserved peptide sequences of cluster 1 (SEQ ID NO: 815-822). In some embodiments, the nuclease polypeptide comprises one or more of the conserved peptide sequences of cluster 4 (SEQ ID NO: 823-832). In some embodiments, the nuclease polypeptide comprises the conserved peptide sequence of cluster 6 (SEQ ID NO: 833). In some embodiments, the nuclease polypeptide comprises the conserved peptide sequence of cluster 7 (SEQ ID NO: 834). In some embodiments, the nuclease polypeptide comprises one or more of the conserved peptide sequences of cluster 9 (SEQ ID NO: 835-840). In some embodiments, the nuclease polypeptide conserved peptide one or more of the consensus sequences of cluster 10 (SEQ ID NO: 841-844).

[0085] In some embodiments, the nuclease polypeptide comprises all the consensus sequences of cluster 1 (SEQ ID NO: 815-822). In some embodiments, the nuclease polypeptide comprises all the consensus sequences of cluster 4 (SEQ ID NO: 823-832). In some embodiments, the nuclease polypeptide comprises all the consensus sequences of cluster 9 (SEQ ID NO: 835-840). In some embodiments, the nuclease polypeptide comprises all the consensus sequences of cluster 10 (SEQ ID NO: 841-844).

[0086] In some embodiments, the nuclease polypeptide has at least 96%, 97%, 98%, or 99% sequence identity to SEQ ID NO: 123. In some embodiments, the nuclease polypeptide comprises a sequence of SEQ ID NO: 123.

[0087] In some embodiments, the nuclease polypeptide has at least 96%, 97%, 98%, or 99% sequence identity to SEQ ID NO: 116. In some embodiments, the nuclease polypeptide comprises a sequence of SEQ ID NO: 116.

[0088] In some embodiments, the nuclease polypeptide has at least 96%, 97%, 98%, or 99% sequence identity to SEQ ID NO: 146. In some embodiments, the nuclease polypeptide comprises a sequence of SEQ ID NO: 146.

[0089] In some embodiments, the nuclease polypeptide has at least 96%, 97%, 98%, or 99% sequence identity to SEQ ID NO: 32. In some embodiments, the nuclease polypeptide comprises a sequence of SEQ ID NO: 32.

[0090] In some embodiments, the nuclease polypeptide has at least 96%, 97%, 98%, or 99% sequence identity to SEQ ID NO: 254. In some embodiments, the nuclease polypeptide comprises a sequence of SEQ ID NO: 254.

[0091] In some embodiments, the nuclease polypeptide has at least 96%, 97%, 98%, or 99% sequence identity to SEQ ID NO: 175. In some embodiments, the nuclease polypeptide comprises a sequence of SEQ ID NO: 175.

[0092] In some embodiments, the polypeptides are engineered from the native sequence for specific functional properties. In some embodiments, these engineered polypeptides have 99%, 95%, 90%, 75%, or 50% sequence identity to the native sequence.

[0093] In some embodiments, the nuclease polypeptide is a polypeptide having at least 99% sequence identity to a sequence selected from SEQ ID NO: 1-273. In some embodiments, the nuclease polypeptide is a polypeptide having at least 98% sequence identity to a sequence selected from SEQ ID NO: 1-273. In some embodiments, the nuclease polypeptide is a polypeptide having at least 97% sequence identity to a sequence selected from SEQ ID NO: 1-273. In some embodiments, the nuclease polypeptide is a polypeptide having at least 96% sequence identity to a sequence selected from SEQ ID NO: 1-273. In some embodiments, the nuclease polypeptide is a polypeptide having at least 95% sequence identity to a sequence selected from SEQ ID NO: 1-273. In some embodiments, the nuclease polypeptide is a polypeptide having at least 94% sequence identity to a sequence selected from SEQ ID NO: 1-273. In some embodiments, the nuclease polypeptide is a polypeptide having at least 93% sequence identity to a sequence selected from SEQ ID NO: 1-273. In some embodiments, the nuclease polypeptide is a polypeptide having at least 92% sequence identity to a sequence selected from SEQ ID NO: 1-273. In some embodiments, the nuclease polypeptide is a polypeptide having at least 91% sequence identity to a sequence selected from SEQ ID NO: 1-273. In some embodiments, the nuclease polypeptide is a polypeptide having at least 90% sequence identity to a sequence selected from SEQ ID NO: 1-273.

[0094] In some embodiments, the nucleic acid-guided nuclease is a recombinant protein. In some embodiments, the nucleic acid-guided nuclease is expressed from a codon-optimized polynucleotide. In some embodiments, the nucleic acid-guided nuclease is expressed from a cell culture.

### 6.3.2. Engineered Nucleases

[0095] In some embodiments, an engineered nucleic acid-guided nuclease is used. In some embodiments, the engineered nucleic acid-guided nuclease is chemically or biologically modified. In some embodiments, the engineered nucleic acid-guided nuclease is modified to increase expression from a host cell, optimize for human or mammalian codons (See PCT/US2013/074667 incorporated by reference), increase stability of the protein, increase its gene editing efficiency, reduce off-target specificity, or change PAM sequence specificity. In some embodiments, the engineered nucleic-acid guided nuclease is modified for desired targeting in vivo or in vitro.

[0096] In some embodiments, one or more modifications previously described to associated with changes in the nucleic acid-guided nuclease functions are introduced to the nucleases described herein. In some embodiments, one or more mutations or modifications are made in a catalytic domain. In some embodiments, the catalytic activity of the nuclease is reduced or destroyed so that the DNA-binding activity is retained but the enzymatic function of the nuclease is reduced or destroyed. In some embodiments the inactivated nuclease is fused to one or more functional domains, for example, functional domains having methylase activity, demethylase activity, transcription activation activity, transcription repression activity, transcription release factor activity, histone modification activity, RNA cleavage activity, DNA cleavage activity, nucleic acid binding activity, exonuclease activity, single base-editing activity, recombinase activity, integrase activity, reverse transcription activity, or molecular switches. A “functional variant” of a protein herein refers to a variant of such protein which retains at least partial activity of a protein. In some embodiments, engineered nucleases of the current application comprise functional variants of naturally occurring nucleases disclosed in the current application. Functional variants are not always homologues.

[0097] In some embodiments, to improve or reduce specificity, the primary residues for mutagenesis are in the RuvC domain of the nuclease, see e.g., Slaymaker et al., 2015, “Rationally engineered Cas9 nucleases with improved specificity” incorporated by reference in its entirety herein. In some embodiments, mutants are designed to accommodate modifications in PAM recognition, for example by choosing mutations that alter PAM specificity and combining those mutations with nt-groove mutations that increase (or decrease) specificity for on-target vs. off-target sequences. In some embodiments, PAM recognition sites of the nucleases described herein can be substituted with a PAM recognition site of a different nuclease to change its PAM specificity.

[0098] In some embodiments, mutations are made specifically to the REC lob, REC1 domain, REC2 domain, Nuc lobe, PAM-interacting domain, WED domain, and/or the bridge helix (BH), see e.g., Paul & Montoya, Biomedical Journal, 43(1): 8-17.

[0099] In some embodiments, mutations comprise modification of amino acids that are positively or negatively charged, hydrophobic or hydrophilic, located in a structural groove or other structural component of the nuclease, substitute any residue with an alanine residue, or are polar or nonpolar.

[0100] In some embodiments, engineered nucleases are fusions of any number of the enzymes listed herein or fusions between the enzymes listed herein and any other Cas enzyme. Engineered nucleases can comprise 99%, 95%, 90%, 80%, 70%, 60%, 50%, 40%, or 30% sequence identity with any of the enzymes listed herein. In some embodiments, the engineered nuclease comprises a fragment of a naturally occurring nuclease described herein.

[0101] In some embodiments, a fusion is made by substituting one or more functional domains of a nuclease described herein.

[0102] In some embodiments, engineered nucleases are generated by modifying non-conserved sequences in Table 2. In certain embodiments, any nuclease from Cluster 1 (Table 2) is mutated at one or more amino acid positions outside of amino acids 630-652, 891-901, 915-931, 1034-1054, 1058-1063, 1217-1229, 1299-1307, 1308-1335, and 1588-1589. In some embodiments, the engineered nuclease comprises conserved sequences of Cluster 1 (SEQ ID Nos: 815-822).

[0103] In certain embodiments, any nuclease from Cluster 4 is modified at one or more amino acid positions outside of amino acids 92-99, 106-111, 113-152, 223-239, 291-303, 396-404, 409-421, 731-791, or 816-874. In some embodiments, the engineered nuclease comprises conserved sequences of Cluster 4 (SEQ ID Nos: 823-832).

[0104] In certain embodiments, any nuclease in Cluster 6 is mutated outside of amino acid positions comprising amino acid positions 1120-1126. In some embodiments, the engineered nuclease comprises the conserved sequence of Cluster 6 (SEQ ID NO: 833).

[0105] In certain embodiments, any nuclease from Cluster 7 is mutated in one or more amino acid positions outside of amino acids 600-654. In some embodiments, the engineered nuclease comprises the conserved sequence of Cluster 7 (SEQ ID NO: 834).

[0106] In certain embodiments, any nuclease from Cluster 9 is mutated outside of amino acid positions comprising amino acids 492-501, 596-625, 685-695, 697-707, 841-891, or 1191-1227. In some embodiments, the engineered nuclease comprises the conserved sequences of Cluster 9 (SEQ ID NO: 835-840).

[0107] In certain embodiments, any nuclease from Cluster 10 is mutated in one or more amino acid positions outside of amino acids 159-215, 630-655, 868-879, or 1052-1076.

[0108] In some embodiments, the engineered nuclease comprises the conserved sequences of Cluster 10 (SEQ ID Nos: 841-844).

[0109] In certain embodiments of the invention, the engineered nuclease is a fusion protein comprising conserved sequences present in divergent nucleases, for example, conserved amino acid sequences from Cluster 1 fused with conserved amino acid sequences from Cluster 4. In certain embodiments, methods other than identifying and mutating conserved sequences are used to alter nuclease function, for example, generating 3D structures to identify functional domains, using machine learning to identify functional domains, and/or conducting large- or small-scale mutagenesis screens followed by functional analysis of variants in vivo or in vitro.

[0110] In some embodiments, the nucleic acid-guided nuclease is expressed from bacterial or mammalian expression constructs and evaluated as recombinant or purified proteins. In some embodiments, functionality is determined by testing the ability to generate DNA double strand breaks and the induction of indel (insertion and deletion) mutations and loss of function (LOF) mutations in cells. In some embodiments, RNP complexes are generated by incubating guide nucleic acids with each nucleic acid-guided nuclease. In one particular embodiment, RNP complexes are generated by incubating 375 pmol of guide nucleic acids with 50 pmol of each nucleic acid-guided nuclease for 10 minutes. In some embodiments, RNP complexes are introduced into cells using electroporation or nucleofection and the cutting efficiency is measured by quantifying the frequency of insertion/deletion mutations in the edited population by performing Sanger sequencing and ICE (Inference of CRISPR Edits, online tool from Synthego) analysis on PCR amplicons containing the cut sites in genes of interest. In some embodiments, successful generation of LOF mutations is confirmed by measuring protein expression levels of targeted genes using western blot, flow cytometry, or ELISA.

### 6.3.3. Signal Peptide Fusions

[0111] In some embodiments, the nuclease polypeptide is fused to a fusion peptide. In the embodiments, the nucleic acid-guided nuclease comprises (1) a nuclease polypeptide and (2) a fusion peptide. The fusion peptide can be a signal peptide. The signal peptide can be a prokaryotic or eukaryotic signal peptide fused in-frame to the nuclease polypeptide. The fusion peptide can be fused to the N-terminus or C-terminus of the nuclease polypeptide. The fusion peptide can be fused in the middle of the nuclease polypeptide. In some embodiments, the fusion peptide is a reporter protein or a tag for purification of the endonuclease polypeptide. In some embodiments, the fusion peptide provides additional functional attributes including transcriptional activation, transcriptional repression, DNA or RNA base editing, recombinase/integrase activity, and nickase activity.

[0112] In some embodiments, the fusion peptide is a signal peptide.

[0113] In some embodiments, the signal peptide is fused in-frame to the C-terminus of the nuclease polypeptide. In some embodiments, the signal peptide is fused in-frame to the N-terminus of the nuclease polypeptide.

### NLS Fusions

[0114] In some embodiments, the nuclease polypeptide is fused to a one or more nuclear localization sequences (NLSs), such as about 1, 2, 3, 4, 5, 6, 7, 8, 9, 10, or more NLSs. In some embodiments, the nucleic acid-guided nuclease comprises 1, 2, 3, 4, 5, 6, 7, 8, 9, 10, or more NLSs at or near the amino-terminus, 1, 2, 3, 4, 5, 6, 7, 8, 9, 10, or more NLSs at or near the carboxy-terminus, or a combination of these (e.g., one or more NLS at the amino-terminus and one or more NLS at the carboxy terminus). When more than one NLS is present, each may be selected independently of the others, such that a single NLS may be present in more than one copy and/or in combination with one or more other NLSs present in one or more copies. In some embodiments, an NLS is considered to be near the N- or C-terminus when the nearest amino acid of the NLS is within about 1, 2, 3, 4, 5, 10, 15, 20, 25, 30, 40, 50, or more amino acids along the polypeptide chain from the N- or C-terminus.

[0115] In some embodiments, an NLS called a monopartite NLS (PKKKRKV from the SV40 Large T-antigen, PAAKRVKLD from c-Myc, or KLKIKRPVK from TUS-protein) is fused at the N or C-terminus of the nuclease polypeptide. In some embodiments, an NLS called a bipartite or nucleoplasmin NLS (KR[PAATKKAGQA]KKKK) is fused at the N or C-terminus.

[0116] In some embodiments, the nuclease enzyme fused with the NLS is used for applications that require trafficking of the fusion enzyme to the nucleus of a cell, e.g., a mammalian cell. The fusion enzyme is therein used for engineering the genome of the cell.

### Functional Fusions

[0117] In some embodiments, the nuclease polypeptide is fused to a transcriptional activation domain. The transcriptional activation domain can be fused to the N- or C-terminus of the nuclease polypeptide. The fusion can be direct or via a linker. The fused transcriptional activation domain recruits the transcriptional preinitiation complex to the promoter of a gene resulting in RNA polymerase mediated expression. In some embodiments, the transcriptional activation domain is or is a variant of the VP16 protein of herpes simplex virus, the nuclear factor kappaB, 65 kDa subunit (p65), Rta (Epstein-Barr virus R transactivator), In some embodiments, multiple domains of the same type or combinations are included.

[0118] In some embodiments, the nuclease polypeptide is fused to a UDG inhibitor (UGI) domain. The UGI domain can be fused to the N- or C-terminus of the nuclease polypeptide. In some embodiments, the deaminase domain is fused to the C-terminus of the nuclease polypeptide. The fusion can be direct or via a linker. In some embodiments, the nuclease polypeptide is fused to a deaminase domain at the N-terminus, and a UGI domain at the C-terminus of the nuclease polypeptide. Uracil DNA glycosylases (UDGs) recognize uracil, inadvertently present in DNA and initiates the uracil excision repair pathway by cleaving the N-glycosidic bond between the uracil and the deoxyribose sugar, releasing uracil and leaving behind a basic site (AP-site). In some embodiments, the UGI domain is or is a variant of UGI from B. subtilis bacteriophage PBS1 or PBS2 (UniProtKB—P14739). In some embodiments, the nuclease polypeptide is fused to a factor involved in double strand break repair choice (e.g., Ct1P, Mre11, and a truncated piece of p53 named DN1s).

### 6.4. Guide Nucleic Acid

[0119] In preferred embodiments, a guide nucleic acid complexes with a compatible nucleic acid-guided nuclease. In some embodiments, a nucleic acid-guided nuclease is used together with a heterologous guide nucleic acid.

[0120] In some embodiments, a nucleic acid-guided nuclease and a heterologous guide nucleic acid originate from two different species. In some embodiments, a nucleic acid-guided nuclease and a heterologous guide nucleic acid originate from the same species. In some embodiments, a nucleic acid-guided nuclease and a heterologous guide nucleic acid originate from the same species but does not present in the same cell in nature.

[0121] Compatibility of nucleic acid-guided nucleases and guide nucleic acids can be determined by empirical testing. Heterologous guide nucleic acids can come from different bacterial species or be non-naturally occurring, being synthetic or engineered.

[0122] In some embodiments, the guide nucleic acid is DNA. In some embodiments, the guide nucleic acid is RNA. In some embodiments, the guide nucleic acid comprises both DNA and RNA. In some embodiments, the guide nucleic acid comprises non-naturally occurring nucleotides. In cases where the guide nucleic acid comprises RNA, the RNA guide nucleic acid can be encoded by a DNA sequence.

[0123] In some embodiments, a guide nucleic acid comprises one or more polynucleotides. In some embodiments, a guide nucleic acid comprises a guide sequence capable of hybridizing to a target sequence, and a scaffold sequence capable of interacting with or complexing with a nucleic acid-guided nuclease. In some embodiments, a guide sequence and a scaffold sequence are in a single polynucleotide. In some embodiments, a guide sequence and a scaffold sequence are in two or more separate polynucleotides.

[0124] A guide nucleic acid can comprise a scaffold sequence. In general, a ‘scaffold sequence’ includes any sequence that has a sequence to promote formation of a ribonucleoprotein particle (RNP), wherein the RNP comprises a nucleic acid-guided nuclease and a guide nucleic acid. In some embodiments, a scaffold sequence promotes formation of the RNP by having complementarity along the length of two sequence regions within the scaffold sequence, such as one or two sequence regions involved in forming a secondary structure. In some cases, the one or two sequence regions are on the same polynucleotide. In some cases, the one or two sequence regions are on separate polynucleotides. Optimal alignment may be determined by any suitable alignment algorithm, and may further account for secondary structures, such as self-complementarity within either the one or two sequence regions. In some embodiments, the degree of complementarity between the one or two sequence regions along the length of the shorter of the two when optimally aligned is about or more than about 25%, 30%, 40%, 50%, 60%, 70%, 80%, 90%, 95%, 97.5%, 99%, or higher.

[0125] In some embodiments, at least one of the two sequence regions is about or more than about 5, 6, 7, 8, 9, 10, 11, 12, 13, 14, 15, 16, 17, 18, 19, 20, 25, 30, 40, 50, or more nucleotides in length.

[0126] In some embodiments, a scaffold sequence of a guide nucleic acid comprises a secondary structure. A secondary structure can comprise a pseudoknot region. In some cases, binding kinetics of a guide nucleic acid to a nucleic acid-guided nuclease is determined in part by secondary structures within the scaffold sequence. In some cases, binding kinetics of a guide nucleic acid to a nucleic acid-guided nuclease is determined in part by nucleic acid sequence with the scaffold sequence.

[0127] In some embodiments, a guide nucleic acid comprises a guide sequence (i.e., a spacer sequence). A guide sequence is a polynucleotide sequence having sufficient complementarity with a target polynucleotide sequence to hybridize with the target sequence and direct sequence-specific binding of a complexed nucleic acid-guided nuclease to the target sequence. The degree of complementarity between a guide sequence and its corresponding target sequence, when optimally aligned using a suitable alignment algorithm, can be about or more than about 50%, 60%, 75%, 80%, 85%, 90%, 95%, 97.5%, 99%, or more. Optimal alignment can be determined with the use of any suitable algorithm for aligning sequences. In some embodiments, a guide sequence is about or more than about 5, 10, 11, 12, 13, 14, 15, 16, 17, 18, 19, 20, 21, 22, 23, 24, 25, 26, 27, 28, 29, 30, 35, 40, 45, 50, 75, or more nucleotides in length. In some embodiments, a guide sequence is less than about 75, 50, 45, 40, 35, 30, 25, 20 nucleotides in length. In preferred embodiments, the guide sequence is 10-30 nucleotides long. The guide sequence can be 15-20 nucleotides in length. The guide sequence can be 15 nucleotides in length. The guide sequence can be 16 nucleotides in length. The guide sequence can be 17 nucleotides in length. The guide sequence can be 18 nucleotides in length. The guide sequence can be 19 nucleotides in length. The guide sequence can be 20 nucleotides in length.

[0128] A guide nucleic acid can be engineered to target a desired target sequence by altering the guide sequence such that the guide sequence is complementary to the target sequence, thereby allowing hybridization between the guide sequence and the target sequence. A guide nucleic acid with an engineered guide sequence can be referred to as an engineered guide nucleic acid. Engineered guide nucleic acids are often non-naturally occurring.

[0129] In some embodiments, genome editing by the nuclease does not require or is not dependent on a trans-activating CRISPR RNA (tracr) sequence and/or direct repeat is 5′ (upstream) of the guide (target or spacer) sequence.

[0130] A targetable nuclease system that includes one or more non-naturally occurring guide nucleic acid is a non-naturally occurring system.

[0131] In some embodiments, a chemical modification that alter RNA stability, subcellular targeting, tracking (e.g., by a fluorescent label) is used to modify guide RNA.

[0132] These modifications are useful for improving the function of novel endonucleases for specific applications.

[0133] In some embodiments, the guide nucleic acid comprises: phosphorothioate, inverted polarity linkages, and abasic nucleoside linkages, locked nucleic acid (LNA), peptide nucleic acid (PNA), morpholino nucleic acid, cyclohexenyl nucleic acid (CeNA); and modified sugar moieties selected from 2′-O-methoxyethyl, 2′-O-methyl, and 2′-fluoro), 2′-dimethylaminooxyethoxy, 2′-dimethylaminoethoxyethoxy. Additional modifications include conjugation of polyamine, polyamide, polyethylene glycol, polyether, cholesterol moiety, cholic acid, thioether, thiocholesterol, 5′ cap (e.g., a 7-methylguanylate cap (m7G)) or 3′ polyadenylated tail (i.e., a 3′ poly(A) tail). Additional modifications include a 5-methylcytosine; a 5-hydroxymethyl cytosine; a xanthine; a hypoxanthine; a 2-aminoadenine; a 6-methyl derivative of adenine; a 6-methyl derivative of guanine; a 2-propyl derivative of adenine; a 2-propyl derivative of guanine; a 2-thiouracil; a 2-thiothymine; a 2-thiocytosine; a 5-propynyl uracil; a 5-propynyl cytosine; a 6-azo uracil; a 6-azo cytosine; a 6-azo thymine; a pseudouracil; a 4-thiouracil; an 8-haloadenin; an 8-aminoadenin; an 8-thioladenin; an 8-thioalkyladenin; an 8-hydroxyladenin; an 8-haloguanin; an 8-aminoguanin; an 8-thiolguanin; an 8-thioalkylguanin; an 8-hydroxylguanin; a 5-halouracil; a 5-bromouracil; a 5-trifluoromethyluracil; a 5-halocytosine; a 5-bromocytosine; a 5-trifluoromethylcytosine; a 5-substituted uracil; a 5-substituted cytosine; a 7-methylguanine; a 7-methyladenine; a 2-F-adenine; a 2-amino-adenine; an 8-azaguanine; an 8-azaadenine; a 7-deazaguanine; a 7-deazaadenine; a 3-deazaguanine; a 3-deazaadenine; a tricyclic pyrimidine; a phenoxazine cytidine; a phenothiazine cytidine; a substituted phenoxazine cytidine; a carbazole cytidine; a pyridoindole cytidine; a 7-deazaguanosine; a 2-aminopyridine; a 2-pyridone; a 5-substituted pyrimidine; a 6-azapyrimidine; an N-2, N-6 or 0-6 substituted purine; a 2-aminopropyladenine; a 5-propynyluracil; or a 5-propynylcytosine.

### 6.7. RNP

[0134] A ribonucleoprotein particle or RNP is a complex formed between nuclease-guided nuclease and guide nucleic acid described in the above sections. The nuclease-guided nuclease and the guide nucleic acid that are compatible can form an RNP having targetable nuclease activity. In preferred embodiments, the RNP can be used for gene editing.

[0135] In some embodiments, the nuclease-guided nuclease and the guide nucleic acid are a natural pair. In some embodiments, it is a complex of a nucleic acid-guided nuclease and a heterologous guide nucleic acid. In some embodiments, the heterologous guide nucleic acid is non-naturally occurring, being synthetic or engineered.

### 6.8. Polynucleotide

[0136] In another aspect, the present invention provides a polynucleotide encoding a nucleic acid-guided nuclease. In some embodiments, the polynucleotide encodes a naturally occurring nucleic acid-guided nuclease. In some embodiments, the polynucleotide encodes a non-naturally occurring nucleic acid-guided nuclease described herein. In certain embodiments, the non-naturally occurring nuclease is an engineered nucleic acid-guided nuclease described herein.

[0137] In some embodiments, the polynucleotide comprises a first polynucleotide segment encoding a nuclease polypeptide and a second polynucleotide segment encoding a fusion peptide. The fusion peptide can be a signal peptide or one or more NLSs.

[0138] In some embodiments, the polynucleotide comprises a first polynucleotide segment encoding the nucleic acid-guided nuclease having at least 95% sequence identity to a sequence selected from SEQ ID NO: 2-273.

[0139] In some embodiments, the polynucleotide has been codon optimized for expression in mammalian cells. In some embodiments, the first polynucleotide is codon optimized. In some embodiments, the polynucleotide has been codon optimized for expression in bacteria or eukaryote or yeast. In some embodiments, the polynucleotide has been codon optimized for expression in human cells.

[0140] In some embodiments, the first polynucleotide segment has a sequence having at least 95%, 96%, 97%, 98%, or 99% sequence identity to a sequence selected from SEQ ID NO: 722-766. In some embodiments, the first polynucleotide segment has a sequence selected from SEQ ID NO: 722-766.

[0141] In some embodiments, the first polynucleotide segment has a sequence having at least 95%, 96%, 97%, 98%, or 99% sequence identity to a sequence selected from SEQ ID NO: 677-721. In some embodiments, the first polynucleotide segment has a sequence selected from SEQ ID NO: 677-721.

[0142] In another aspect, the present disclosure provides a vector encoding the nucleic acid-guided nuclease provided herein. In some embodiments, the vector comprises the polynucleotide described herein. In some embodiments, the vector comprises at least one mRNA. In some embodiments, the vector further comprises a promoter or other regulatory element operably linked to the polynucleotide encoding the nucleic acid-guided nuclease. In some embodiments, the regulatory element drives expression in a tissue-specific (e.g., liver, brain, lymphocyte, muscle, tumor, virus-infected cells, etc.) or temporally specific manner (e.g., embryonic, fetal, cell cycle specific, etc.). In some embodiments, the vector is a plasmid. In some embodiments, the vector is a viral vector. In certain embodiments, the vector is an AAV, retrovirus, adenovirus, helper dependent adenovirus, or lentivirus (including IDLV). In certain embodiments, the means of delivery is a particle, nanoparticle, or lipid nanoparticle. In certain embodiments, the means of delivery is by exosomes or fusosomes. In certain embodiments, the means of delivery is a microbubble. In certain embodiments, the means of delivery is by electroporation. In some embodiments, expression constructs are introduced into target cells using electroporation or transfected using lipid or chemical-based methods, “gene-guns” using particle bombardment, microinjection, ligand mediated gene delivery, impalefection, laser irradiation, photoporation, sonoporation, hydroporation, and magnetofection.

[0143] In some embodiments, prokaryotic and eukaryotic expression constructs are designed to express both the nucleic acid-guided nuclease and guide nucleic acid in target cells. In some embodiments, expression constructs are for transient or stable expression in target cells. In some embodiments, constructs are designed to express a single or numerous guide nucleic acids in tandem.

[0144] In some embodiments, the nucleic acid-guided nuclease and guide nucleic acid are delivered as RNA.

[0145] In some embodiments, biological tools, or systems such as viral vectors are used to deliver the nucleic acid-guided nuclease and guide nucleic acid into target cells. In some embodiments, this involves the generation of vectors that produce viral particles in a helper cell line. Viral particles are collected and used to transduce the target cell line. In some embodiments, viral vectors are either integrating or non-integrating vectors such as lentiviral, adenoviral, and adeno-associated viral vectors. In some embodiments, these biological tools are used to introduce either or both the nucleic acid-guided nuclease and guide nucleic acid into target cells. In some embodiments, expression of both or either the nucleic acid-guided nuclease and guide nucleic acid is controlled using inducible expression vectors. In some embodiments, expression from vectors is controlled using cell type specific promoters to drive either or both the nucleic acid-guided nuclease and guide nucleic acid expression in specific cell types. This allows for systemic delivery of viral particles but restricts expression to specific cell type in an organism.

### 6.9. Host Cell

[0146] In yet another aspect, the present disclosure provides a host cell comprising the nucleic acid-guided nuclease provided herein. In some embodiments, the host cell comprises a polynucleotide encoding a nucleic acid-guided nuclease. In some embodiments, the host cell comprises a vector comprising a polynucleotide encoding a nucleic acid-guided nuclease.

[0147] In some embodiments, the nucleic acid-guided nuclease is a naturally occurring protein. In some embodiments, the nucleic acid-guided nuclease is a synthetic or engineered protein.

[0148] In some embodiments, the host cell further comprises a guide nucleic acid. In some embodiments, the guide nucleic acid is a heterologous guide nucleic acid. In some embodiments, the host cell comprises an expression construct encoding a guide nucleic acid.

[0149] In some embodiments, a guide nucleic acid is provided in a cassette in a single polynucleotide with the polynucleotide encoding a nucleic acid-guided nuclease.

[0150] The host cell can be transiently or non-transiently transfected with one or more vectors, linear polynucleotides, polypeptides, nucleic acid-protein complexes, or any combination thereof.

[0151] In some embodiments, the host cell is a prokaryotic cell. In some embodiments, the host cell is a eukaryotic cell. Reference is made to PCT/US13/74667, incorporated herein by reference. In some embodiments, modifications are made to germline cells, resulting genetically engineered multicellular organisms, for example a knock-in or knock-out mouse, rat, or human. See Platt et al., Cell, 159(2):440-455, which is incorporated herein by reference. In some embodiments, the host cell may be a non-mammalian eukaryotic cell such as a poultry bird (e.g., chicken), a vertebrate fish (e.g., salmon), shellfish (e.g., oyster, clam, shrimp), insect (e.g., fruit fly), yeast, or plant (e.g., cassava, corn, sorghum, soybean, oat, rice, citrus, nut trees, cotton, tobacco, edible fruits, edible vegetables, coffee, cocoa), such that a cell, tissue, or full organism is edited using the nuclease.

### 6.10. Targetable Nuclease System

[0152] In one aspect, the present disclosure provides a targetable nuclease system for editing a target region of a eukaryotic or prokaryotic genome, comprising (1) a nucleic acid-guided nuclease, and (2) a guide nucleic acid for complexing with the nucleic acid-guided nuclease. In some embodiments, the system further comprises (3) a homology template configured to bind to the target region.

### 6.10.1. Nucleic Acid-Guided Nuclease

[0153] The gene editing system comprises a nucleic acid-guided nuclease described herein. The nucleic acid-guided nuclease can be a naturally occurring nuclease or an engineered nuclease.

[0154] The targetable nuclease system can comprise any of the nucleic acid-guided nuclease described herein. In some embodiments, the nucleic acid-guided nuclease comprises a nuclease having at least 95% sequence identity to a sequence selected from SEQ ID NO: 2-273.

[0155] In some embodiments, the nucleic acid-guided nuclease is originated from Acidaminococcus massiliensis, Acidaminococcus sp., Acinetobacter indicus, Agathobacter rectalis, Anaerovibrio lipolyticus, Bacteroidales bacterium, Bacteroides galacturonicus, Bacteroides plebeius, Bacteroidetes bacterium, Butyrivibrio fibrisolvens, Butyrivibrio hungatei, Butyrivibrio sp., Candidatus Falkowbacteria bacterium, Candidatus Falkowbacteria bacterium, Candidatus Gottesmanbacteria bacterium, Candidatus Jacksonbacteria bacterium, Candidatus Magasanikbacteria bacterium, Candidatus Moranbacteria bacterium, Candidatus Pacebacteria bacterium, Candidatus Roizmanbacteria bacterium, Candidatus Ryanbacteria bacterium, Candidatus Saccharibacteria bacterium, Candidatus Sungbacteria bacterium, Candidatus Uhrbacteria bacterium, Candidatus Wildermuthbacteria bacterium, Candidatus Yonathbacteria bacterium, Catenovulum sp., Clostridiales bacterium, Clostridium sp., Coprococcus eutactus, Coprococcus sp., Deltaproteobacteria bacterium, Elizabethkingia sp., Eubacteriaceae bacterium, Eubacterium eligens, Eubacterium rectale, Eubacterium sp., Eubacterium ventriosum, Fibrobacter sp., Fibrobacter succinogenes, Firmicutes bacterium, Flavobacterium branchiophilum, Francisella hispaniensis, Francisella novicida, Francisella philomiragia, Francisella tularensis, Lachnospiraceae bacterium, Lachnospira pectinoschiza, Lentisphaeria bacterium, Leptospiraceae bacterium, Leptospira sp., Moraxella bovis, Moraxella bovoculi, Moraxella lacunata, Moraxella ovis, Moraxella sp., Muribaculaceae bacterium, Patescibacteria group bacterium, Phycisphaerae bacterium, Phycisphaerales bacterium, Porphyromonadaceae bacterium, Porphyromonas crevioricanis, Prevotella brevis, Prevotellaceae bacterium, Prevotella copri, Prevotellamassilia sp., Prevotella ruminicola, Prevotella sp., Prolixibacteraceae bacterium, Pseudobutyrivibrio sp., Pseudobutyrivibrio xylanivorans, Psychrobacter sp., Ruminococcaceae bacterium, Ruminococcus sp., Sedimentisphaera cyanobacteriorum, Sneathia amnii, Spirochaetia bacterium, Succinivibrionaceae bacterium, or Treponema sp. In some embodiments, the nucleic acid-guided nuclease is a variant or a modification of a naturally occurring nucleic acid-guided nuclease. In some embodiments, the nucleic-acid guided nuclease comprises a nuclease polypeptide and a fusion peptide. The fusion peptide can be a signal peptide or one or more NLSs.

[0156] In some embodiments, the nucleic acid-guided nuclease is produced from a codon-optimized polynucleotide.

### 6.10.2. Guide Nucleic Acid

[0157] The gene editing system further comprises a guide nucleic acid described herein. The guide nucleic acid can be naturally occurring, synthetic, or engineered.

[0158] In some embodiments, the engineered guide polynucleotide is designed to form a complex with the nuclease and comprises a guide sequence, wherein the guide sequence is designed to hybridize with a target sequence in a prokaryotic or eukaryotic cell.

[0159] In some embodiments, a nucleic acid-guided nuclease is used together with a heterologous guide nucleic acid, which is compatible with the nucleic acid-guided nuclease, thereby forming a functional RNP.

[0160] In some embodiments, a nucleic acid-guided nuclease and a heterologous guide nucleic acid originate from two different species. In some embodiments, a nucleic acid-guided nuclease and a heterologous guide nucleic acid originate from the same species. In some embodiments, a nucleic acid-guided nuclease and a heterologous guide nucleic acid originate from the same species but does not present in the same cell in nature.

### 6.10.3. Homology Template

[0161] A homology template includes a sequence homologous to a target sequence. The target sequence can be any polynucleotide endogenous or exogenous to a prokaryotic or eukaryotic cell. For example, the target sequence can be a polynucleotide residing in the nucleus of the eukaryotic cell. In some embodiments, the target region is in a eukaryotic cell genome. In some embodiments, the target region is in a bacterial cell genome. In some embodiments, the target region is in a plant cell genome. In some embodiments, the target region is in a mammalian cell genome. In some embodiments, the target region is in a human genome.

[0162] The target sequence can be a coding sequence or a non-coding sequence. The target sequence can be localized close to or include a PAM; that is, a short sequence recognized by an RNP. In some embodiments, PAMs are 2-5 base pair sequences adjacent the target sequence. A PAM can be 1, 2, 3, 4, 5, 6, 7, 8, 9, 10 or more nucleotides in length.

[0163] In some embodiments, the PAM sequence is TTTV (wherein V is any one base selected from A, C, or G). In some embodiments, the PAM sequence is not TTTV. In some embodiments, the PAM sequence is selected from NTTN, NCTV, CTTV, GTTV, NCTV, TCTV, and NTTV (wherein N is any one base selected from A, T, C, or G).

[0164] A homology template can comprise at least one mutation or a modification relative to a target sequence. In some embodiments, the homology template comprises an insertion, deletion, or modification compared to the target region. The homology template can comprise a sequence complementary to the target region.

[0165] A homology template can comprise a homology region (or homology arms) flanking at least one mutation or a modification relative to a target sequence, such that the flanking homology regions facilitate homologous recombination of the editing sequence into a target sequence. In some embodiments, the at least one mutation is one or more PAM mutations that mutate or delete a PAM site. A PAM mutation can be a silent mutation. A PAM mutation can be a non-silent mutation. Non-silent mutations can include a missense mutation. An editing sequence can comprise one or more mutations in a coding or non-coding sequence relative to a target site.

[0166] In some embodiments, the homology template comprises at least one mutation relative to a target sequence. A mutation can be a silent mutation or non-silent mutation, such as a missense mutation. A mutation can include an insertion of one or more nucleotides or base pairs. A mutation can include a deletion of one or more nucleotides or base pairs. A mutation can include a substitution of one or more nucleotides or base pairs for a different one or more nucleotides or base pairs. Inserted or substituted sequences can include exogenous or heterologous sequences. In some embodiments, the homology template further comprises an exogenous sequence flanked by homology regions.

[0167] In some embodiments, homology regions within the homology template flank the one or more mutations of the editing cassette and can be inserted into the target sequence by recombination. Recombination can comprise DNA cleavage, such as by a nucleic acid-guided nuclease, and repair via homologous recombination.

[0168] In some embodiments, a homology template is in a vector or provided as a separate polynucleotide, such as an oligonucleotide, linear polynucleotide, or synthetic polynucleotide. In some embodiments, a homology template is on the same polynucleotide as a guide nucleic acid. In some embodiments, a homology template is on a separate polynucleotide as a guide nucleic acid. In some embodiments, a homology template is designed to serve as a template in homologous recombination, within or near a target sequence nicked or cleaved by a nucleic acid-guided nuclease. A homology template can be of any suitable length, such as about or more than 10, 15, 20, 25, 50, 75, 100, 150, 200, 500, 1000, or more nucleotides in length. In some embodiments, a homology template is complementary to a portion of a polynucleotide comprising the target sequence. A homology template can overlap with one or more nucleotides of a target sequences (e.g., about or more than about 1, 5, 10, 15, 20, 25, 30, 35, 40, 50, 100, 150, 200, 250, 300, 400, 500, 600, 700, 800, 900, 1000, or more nucleotides).

### 6.11. Method of Editing a Genome

[0169] In one aspect, the present disclosure provides a method of modifying a target region of a eukaryotic or prokaryotic genome using a gene editing system provided herein. The method can comprise the steps of (1) contacting a sample comprising the target region with (i) a nucleic acid-guided nuclease and (ii) a guide nucleic acid complexed with the nucleic acid-guided nuclease and (2) allowing the nucleic acid-guided nuclease to modify the target region. In some embodiments, the sample is further contacted with (iii) a homology template configured to bind to the target region.

[0170] In some embodiments, the sample comprises a eukaryotic cell, a bacterial cell, a plant cell, a mammalian cell or a human cell. In some embodiments, the sample comprises an immune cell. In some embodiments, the immune cell is a B cell or T cell. In some embodiments, the cell for genome editing is a germline cell, which results in a transgenic multicellular organism, such as a human, mouse, or rat. In some embodiments, the cell for genome editing is a stem cell, hematopoietic stem cell, induced pluripotent stem cell, or other such target cell which allows for nuclease-mediated genome editing followed by derivation of specific cell or tissue types.

[0171] In some embodiments, one or more vectors encoding one or more components of a gene editing system are introduced into a host cell. In some embodiments, a nucleic acid-guided nuclease and a guide nucleic acid are operably linked to separate regulatory elements on separate vectors. In some embodiments, two or more of the elements expressed from the same or different regulatory elements combined in a single vector are introduced. When several elements are combined in a single vector, the coding sequence of one element may be located on the same or opposite strand of the coding sequence of a second element, and oriented in the same or opposite direction. In some embodiments, a single promoter drives expression of a transcript encoding a nucleic acid-guided nuclease and one or more guide nucleic acids. In some embodiments, a nucleic acid-guided nuclease and one or more guide nucleic acids are operably linked to and expressed from the same promoter. In other embodiments, one or more guide nucleic acids or polynucleotides encoding the one or more guide nucleic acids are introduced into a cell in the in vitro environment already comprising a nucleic acid-guided nuclease or polynucleotide sequence encoding the nucleic acid-guided nuclease. Delivery vehicles, vectors, particles, nanoparticles, formulations, and components thereof for expression of one or more elements of the nucleic acid targeting system are as used elsewhere, e.g., PCT/US2013/074667 incorporated by reference herein.

[0172] In some embodiments, the method comprises the step of contacting more than one guide nucleic acid. In some embodiments, each of the more than one guide nucleic acid has a different guide sequence, thereby targeting a different target sequence.

[0173] In some embodiments, the method is used for modifying a target region in a prokaryotic or eukaryotic cell in vivo, ex vivo, or in vitro. In some embodiments, the method comprises sampling a cell or a population of cells such as prokaryotic cells, or those from a human or non-human animal or plant for gene editing. Culturing may occur at any stage in vitro or ex vivo. The cell or cells may even be re-introduced into the host.

[0174] In some embodiments, the method comprises the step of allowing a RNP to bind to the target sequence to effect cleavage of said target region, thereby modifying the target region.

[0175] The present invention relates to engineering and optimization of systems, methods, and compositions used for the control of gene expression involving DNA or RNA sequence targeting, that relate to the nucleic acid targeting system and components thereof. In some embodiments, viral vectors are used to deliver libraries of nuclease-guided nucleases and or libraries of guide nucleic acids into target cells. In some embodiments, bacteria such as Agrobacterium tumefaciens are used to transfer the sequences for nuclease-guided nuclease and the guide nucleic acid into the plant genome.

[0176] In some embodiments, these methods are used to introduce the nuclease-guided nuclease and guide nucleic acid sequences into prokaryotes and eukaryotes including but are not limited to bacteria, yeast, fungi, nematodes, drosophila, zebrafish, mice, rats, primates, and other animal model systems.

[0177] In some embodiments, the sequences for the nucleic acid-guided nuclease and guide nucleic acid are delivered into target cells using the systems described above to make knock out (KO) or LOF mutations by inducing DNA double stranded breaks (DSBs).

[0178] In some embodiments, the sequences for the nucleic acid-guided nuclease and guide nucleic acid are delivered with homology directed repair (HDR) templates for making knock-in (KI) mutations. In some embodiments, HDR templates are provided as either single stranded or double stranded DNA and are introduced simultaneously with the nucleic acid-guided nuclease and guide nucleic acid, or sequentially using the methods for gene transfer described above. In some embodiments, HDR templates are engineered to incorporate naturally occurring or synthetic sequences into the target genome.

[0179] In some embodiments, modified versions of the nucleic acid-guided nuclease are generated to make a “CRISPR-Nickase” which results in a DNA single strand break. In some embodiments, this alternation may enhance fidelity and decrease off target editing and is used for generating KO or KI mutations.

### 6.12. Genome-Edited Cells

[0180] In one aspect, the present disclosure provides a cell comprising a genome modified by the method described herein. In some embodiments, the cell is an immune cell. In some embodiments, the cell is B cell or T cell.

[0181] An advantage of the present invention is that it minimizes or avoids off-target binding and its resulting side effects while editing the genome of cells.

[0182] In some embodiments, a disease associated gene or polynucleotide has been modified. In some embodiments, a polynucleotide encoding a B cell or T cell receptor has been modified.

[0183] In some embodiments, the gene editing comprises knocking out genes, modifying gene regulatory sequences to increase or decrease RNA expression, editing genes, altering genes, amplifying genes, replacing genes, inserting genes, and repairing particular mutations.

[0184] In some embodiments, the engineered nucleic acid-guided nuclease is an enzymatically dead nuclease which is used to block transcription of a target gene without altering the host cells genomic DNA sequence.

[0185] In some embodiments, an enzymatically dead nucleic acid-guided nuclease is fused to transcriptional activators to enhance transcription of a target gene without altering the host cells genomic DNA sequence.

[0186] In some embodiments, a library of sequences for the nucleic acid-guided nuclease or guide nucleic acid is introduced into cells to alter gene expression to identify gene functions at the genome level. In some embodiments, these screens may result in novel biological insights or the identification of novel drug targets.

[0187] In some embodiments, an enzymatically dead nucleic acid-guided nuclease and a guide nucleic acid are utilized for Chromatin immuno-precipitation (ChIP) of regions of the genome. In some embodiments, the nuclease is fused to a protein tag to allow for binding and purification of specific regions of chromatin. In some embodiments, these tags include the hemagglutinin (HA) domain, an IF2 domain, a GST domain, a green florescent protein domain, and a 6×His tag. In some embodiments, these proteins and are used for epigenetic, genomic, and proteomic profiling of specific chromatin regions.

[0188] In some embodiments, an enzymatically dead nucleic acid-guided nuclease is fused to enzymes which modify or label DNA. In some embodiments, enzymes such as methyltransferases, demethylases, acetyltransferases, and deacetylases are used to add or remove modifications to the target cell genome.

[0189] In some embodiments, an enzymatically dead nucleic acid-guided nuclease is fused to florescent proteins to visualize chromatin dynamics during cellular processes such as DNA replication. In some embodiments, the enzymatically inactive nucleic acid-guided nuclease florescent reporter is used to detect specific nucleic acids within live or dead cells.

[0190] In some embodiments, the nucleic acid-guided nuclease used as a diagnostic to detect viral pathogens or microbial contaminants in biological samples. In some embodiments, the nucleic acid-guided nuclease is enzymatically active or enzymatically dead and is used to detect nucleic acids using enzymatic reporters such as horseradish peroxidase, alkaline phosphatase, or florescent reporters such as green fluorescent protein.

[0191] In some embodiments, the nucleic acid-guided nuclease and guide nucleic acid are introduced into germ cells, gametes, zygotes, blastomeres, and embryonic stems to generate genetically engineered multi-cellar organisms for basic research or disease modeling. In some embodiments, the nucleic acid-guided nuclease and guide nucleic acid are introduced into cells using in vitro, ex vivo, or in vivo methods. In some embodiments, modified organisms are fungi, plants, and eukaryotes.

[0192] In some embodiments, the nucleic acid-guided nuclease and guide nucleic acid are introduced into somatic cells in vivo to generate genetically engineered multi-cellar organisms. In some embodiments, modified organisms are fungi, plants, and eukaryotes. In some embodiments, these approaches would aim to modify specific cell types or all cells within a developed or developing organism.

[0193] In some embodiments, the nucleic acid-guided nuclease and guide nucleic acid are introduced by intravenous injections, retro-orbital injection, intratracheal injection, intratumoral injection, joint and soft tissue injections, intra-muscular injection, intralesional injection, intraocular injection, or other methodologies for delivering nucleic acids, viral vectors, or RNA & protein complexes into tissues within a living organism.

[0194] In some embodiments, these methods are used for cancer or disease modeling, cell biological or genetic research, correction of disease associated mutations, cell therapies, wound healing and regeneration, diagnostics, imaging tools, agricultural purposes, drug discovery, and drug development and manufacturing.

[0195] In some embodiments, primary cells from patients are obtained and the nucleic acid-guided nuclease and guide nucleic acids are delivered into cells ex vivo. In some embodiments, cells are modified to contain any of the genomic, epigenomic, or transcriptomic alterations described above. In some embodiments, modified cells are introduced back into patients for therapeutic purposes. In some embodiments, these modifications either correct disease associated mutations or introduce sequences to enhance the regeneration or health promoting capacity of immune cells. In some embodiments, the engineered cells are used as therapeutics for cancer, autoimmunity, or infectious disease. In some embodiments, the target cells are T cells, natural killer cells, antigen presenting cells, macrophages, and hematopoietic stem cells. In some embodiments, T cell receptors (TCRs) or chimeric antigen receptors (CARs) are introduced into immune cells (e.g., T cells) from the patient and infused back into the patient. In some embodiments, the Cas nucleases are used to KO genes, e.g., endogenous TCRs, human leukocyte antigens, or immune suppressive genes. In some embodiments, the target cells are allogeneic (i.e., from a donor rather than the patient). In some embodiments, molecular switches, kill switches, or secretory or membrane bound proteins which facilitate tumor infiltration are introduced into the engineered cells.

### 6.13. Examples

### 6.13.1. Example 1: Identification and Computational Analysis of Nucleic Acid-Guided Nucleases in Prokaryotic Genomes

[0196] MAD7 is a Cas12a variant with only 31% homology with the canonical AsCpf1 from Acidominococcus species at the amino acid level and has evolved further away from Cas9 compared to AsCpf1. MAD7 amino acid sequence was used as query to search for homologs within other prokaryotes. blastx was used to query against 134,655 prokaryotic genomes in the NCBI Genbank database. 381 MAD7 homologs, which we term the “GIG-” nucleases or “GIG-” enzymes or “GIG-” Cas nucleases or “GIG-” Cas enzymes, were identified in this computational search. In an effort to obtain full-length coding sequences, the homolog sequences were extended upstream to the nearest methionine (if present), and downstream to the nearest stop codon (if present). These homologs had an average of 44.2% (range 22.96%-98.89%) identity to MAD7 amino acid sequence (FIG. 1). The homolog protein sequences were aligned to MAD7 using Clustal Omega (see Sequence Listing) and a phylogenetic tree was generated (FIG. 2).

[0197] In the same genomes where the nuclease sequences were discovered, CRISPR repeat arrays were searched for using PILER-CR (Edgar BMC Bioinformatics 8:18, 2007). When transcribed, the CRISPR repeats form the CRISPR RNA (crRNA) containing a stem loop structure and the spacer region for sequence-specific targeting. Palindromic sequences were searched for within the CRISPR repeat sequences using the findPalindromes function of the R package, Biostrings, using stem loop arm length of 5 nucleotides, and loop length within 3 to 5 nucleotides. The majority of the predicted crRNAs contained the canonical stem loop left arm sequence of TCTAC, with a minority of them containing novel stem loop left arm sequences of TCTGC, ATTTC or CCTAC (FIG. 3). The CRISPR repeat sequences are listed as SEQ IDS 274-627.

[0198] To identify conserved domains in the MAD7 homologs, clusters were identified within the list of MAD7 homologs. Using the R packages ape and geiger, 12 clusters were identified containing varying number of homolog sequences (FIG. 2). A multiple sequence alignment was performed and consensus amino acid sequences were generated for sequences within each cluster, as provided in Table 1.

[0199] Furthermore, among the consensus sequences, conserved domains were identified as strings (i.e., peptides) containing ≥4 amino acids with ≤10% ambiguous amino acids and no gaps. These conserved peptide sequences, which may represent domains of functional importance to the GIG-Cas enzymes, are listed in Table 2. Non-conserved amino acids in the conserved domains are marked as Xs.

TABLE 1
Alignment of 272 MAD7 GIG- nuclease homologs with ClustalW.

| | GIG- | | |
|---|---|---|---|
| | nuclease | | |
| | SEQ ID | | |
| Cluster | NO | Position | Consensus sequence |
| 1 | 188, 204, | 1-49 | -----XXX-XNNFXXFIG---IXSXXKTLRNELIP-TXXTQEXIEKNX- |
| | 221, 256, | 50-98 | ---------IXXEDELRAENXQXXKXIXDDYXRXFIXEXLS-------- |
| | 240, 233, | 99-147 | --------------IXDIDWXXLFEAMEXXLKX--XD------------ |
| | 189, 202, | 148-196 | ----------XKXXLEKEQAEKRKXIYKKXXDDDRFKXXFXAKLISXXL |
| | 185, 247, | 197-245 | PEFXXXN--XX-----------XKEEKXEAXKLFXXFATXFXXXFKNRK |
| | 191, 201, | 246-294 | NXXSAXAISXSICXRIVNXNXPXFLSNXLVXXRIXKNXP-XXIXKIEXE |
| | 246, 81, | 295-343 | LKDXLX--------XXSLEEIXSXXFYXXVXTQXG------IDFYNDIC |
| | 83, 243, | 344-392 | GXXNXXMNLYCQXXKNXK-X-------X---------NXXKMRKLHKQI |
| | 88, 258, | 393-441 | LXXRETSSEXPXKFESDEEVYXSVNXFL--------DNXXSKNIXERLR |
| | 223, 131, | 442-490 | KXGXNXNXYX--LDKIYIXXKXYXXVSQKXYGXWXTINXALEXXYXNXX |
| | 214, 226, | 491-539 | XGKGKSKXXKV-----KKAVKXDXXKSXXEXNELVXXYXX--------- |
| | 85, 231, | 540-588 | -------------------------X-KAEXYIXEISXILXXXEXXELK |
| | 79, 80, | 589-637 | Y--NPXIXLIENEEKAXEXKNXLDXIMNXFHWCXVFXXE--EEVXKDNN |
| | 217, 238, | 638-686 | FYAELEEIYDELXP-------XXSLYNXVRNYVTQKPYSTK-KIKLNFG |
| | 87, 254, | 687-735 | IPTLADGWSKXKEYDNNAIILXXDX----XYYLGIFNAKX-XXDKKIIE |
| | 248, 241, | 736-784 | G------------------------SEXXGDYKKMXYNLLPGP------ |
| | 242, 65, | 785-833 | ----------------NKMXP--------XVFLSSKTGXETYKPS---- |
| | 94, 95, | 834-882 | -------------XYILEGYXQNK-------XXXX-------------- |
| | 143, 176, | 883-931 | --------SKNFDIKFCX-DLIDXXKX-----CIAKHPXWKNFGFKFS- |
| | 17, 169, | 932-980 | --DTSX---------------YEDISGFYREVEKQGYKIDXTYISEKDI |
| | 165, 160, | 981-1029 | XXLVEXGXLYLFQIYNKDFXEXSTG------KDNLHTXYXKNLFS---- |
| | 172, 157, | 1030-1078 | ----EENLKXIVLKLNGEAELFXR----KSSIK--KPXIHKKGSILVNX |
| | 166, 163, | 1079-1127 | TYKXXEX---------XXX-IPXXIYQEXYKYFN----KXXXELSDEAK |
| | 10, 16, | 1128-1176 | KXKD--KVGHKEAXHXIVKDXRYTXD-KXFXHXPITINFKA---XK-XX |
| | 122, 126, | 1177-1225 | INXRVLXYXAKNP-DXXXIGIDRGERXLIYXSXIXXXGX-IXEQKSFNI |
| | 139, 144, | 1226-1274 | VNG----------YXYQEKLKQREXERDXARKXWXEIGKIKXLKEGYLS |
| | 145, 23, | 1275-1323 | LVXHEIAKXXXXYNAIXXMEDLN-YGFKRGRF-KVERQVYQKFETMLIN |
| | 155, 123, | 1324-1372 | KLNYLVFKDRX-XXENGGXLXGYQLTYIPESLKNXGKQCGXXFYVPAAY |
| | 137, 138, | 1373-1421 | TSKIDPTTGFVNIFNFKDLTNXX------KXKEFLXKFDSIRYDXEKX- |
| | 18, 48, | 1422-1470 | ---------LFXFTFDYNNFKTXN------------------XXMXX-X |
| | 125, 127, | 1471-1519 | WTVYTYG-ERIXRXFXX------------XRXXXXSXXIDPTXXXXKXX |
| | 128, 135, | 1520-1568 | E----XXXINXXDGHDXRXDIXDXEXX---------XXX-FXXXXFEIF |
| | 136, 150, | 1569-1617 | XLTXQMRNSLXX----XX-D----XDXXISPVLN-XNXXFXDSXXXXXK |
| | 153, 1, 59, | 1618-1666 | ------------LPKDADANGAYXIALKGLYXXKQIKXXXKEDGKFXRX |
| | 15, 134, | 1667-1694 | XLKISNXDWFDFIQNKRYL--------- |
| | 171, 32, | | |
| | 175, 184, | | |
| | 159, 156, | | |
| | 199, 147, | | |
| | 146, 149, | | |
| | 154, 148, | | |
| | 198, 60, | | |
| | 120, 19, | | |
| | 197, 161, | | |
| | 173, 174, | | |
| | 50, 49, | | |
| | 196, 5, | | |
| | 130, 3, | | |
| | 200, 74, | | |
| | 97, 177, | | |
| | 33, 41, 86 | | |
| 2 | 228, 236, | 1-51 | XXXXEXXTXXXXXXKXXXXELXXXGKTXXXIXXXGXXXXDXXXXXXXXXXX |
| | 8 | 52-102 | KXXIDXXXXXXXXXXLXXXXXDXXXXXXXXXXXXXXXXXXXXXXXXXXLXX |
| | | 103-153 | XXXXAXPXXXXXXXXXXXXXXLQXXXXXXXXXXXXXXXXXXXXXXXXXXXX |
| | | 154-204 | XXXXXXXXXXFXXXXIXXXXXXTXXXXXXXXXXXXXXXXXNXXXXXXIXXX |
| | | 205-255 | XXXXXXNXXXXXXLXXXXXXXXXXXXXXXXDXXNXXXXXXIXXXXXXXXXL |
| | | 256-306 | XXXXXEYXXXXXXXXXXXXXXXXXXQLXKQXLXXXXXXXXXXXXXTXDEXX |
| | | 307-357 | XVXXXXXXXXXXXXXXXLXXXXXXXXXXXGXXXXXXXXXLXXXXXXXXGXX |
| | | 358-408 | KXXXDXXXXXXXXXXXEXLXXXXXXXXXXXXXXXXXXXXXXXXXXXXXXXX |
| | | 409-459 | XLXXXXXXXXXXXXXXXKXXXXXXXXXXXXXXXEAXXXXXXXXXXXXXXXX |
| | | 460-510 | XXXXXXXXXXXXXXXXXAXXXXXXXXXXXXXXXXXEXXXXXFYXXFXXIXX |
| | | 511-561 | XXXXXXXXXXXVRNXXTKXXXXXXXXXXXXXXXXAXXXXXXWXXXXXXXXX |
| | | 562-612 | XXXXXKXDXKYYXXXXXXXXXXXXXXXXXXXXXXXXXXXXXXXXXXXXXXX |
| | | 613-663 | XXXXXXXXXXXXXXXXXXXXXDXXXXXXXXXXXXXXXXXXXXXXXXXXXXX |
| | | 664-714 | XXXXXXXXXXXXXXXXIXXXXXXXXXXXXYXXXXXXXXXXXXXYXDXXXFX |
| | | 715-765 | XXXXXXXXXXXXXXXIXXXXXXXLVDXGXXXLFXXXXKXXXXXXXXXXXXX |
| | | 766-816 | XXXXXXXXXXXXXXXXXXXXXXXXXXXXXXXXXXXXXXXXXXXXXNXXXXX |
| | | 817-867 | XXXXXXXXXEXXXXXXNXXSXXXXXXXXXXXXYXRXXXXXXXXXXXXXXXX |
| | | 868-918 | XXYXXXKXXLXXXXXXNXXXXXXVXXXXNXXVXEXXQXGXXXXIXXXXRXX |
| | | 919-969 | XXXXYXXVLXXXXXIXXXXSLNVIXXVDYXXLLXXXXXXXXXXXXXWXXXX |
| | | 970-1020 | XXXXLKXXYXXXAXXXXXXLXRXYNAXXXXEXXXXXXXXXXXXIDXQXXXX |
| | | 1021-1071 | FEXXXXXXLXXXXXKXVXDXXXXGSXXXXLQLXXXXXXXXXXXXXQXGILF |
| | | 1072-1122 | FXXXXYTXXIDPXXGFXXLFDXXXXXXXXXXXKXFXXXXXXSYXXDXXXFX |
| | | 1123-1173 | FXXXXXXVXXXTXXXXXXXXXXWXXXXXGXXXXXXXXXXXXXXXXXXXXXX |
| | | 1174-1224 | XXXKXXXXXXXIXXXXXXDLXXXXXXXXXXXDXXXXXXXXFXXXXXRXXXX |
| | | 1225-1275 | XXTXXXXXXXXXXXXXXXXXXXXXXXXXXKXPXXGXXXXXYNIXXXXXXXX |
| | | 1276-1306 | XXLXXXXXXXLXXXXXXXXXXXEXXXXXXXX |
| 3 | 245, 272 | 1-51 | XXXXXXXXXXXXXXXXXXXXXXXXXXXXXXXXXXXXXXXXXXXXXXXXXXX |
| | | 52-102 | XXXXXXXXXXXXXXXXXXXXXXXXXXXXXXXXXXXXXXXXXXXXXXXXXXX |
| | | 103-153 | XXXXXXXXXXXXXXXXXXXXXXXXXXXXXXXXXXXXXXXXXXXXXXXXXXX |
| | | 154-204 | XXXXXXXXXXXXXXXXXXXXXXXXXXXXXXXXXXXXXXXXXXXXXXXXXXX |
| | | 205-255 | XXXXXXXXXXXXXXXXXXXXXXXXXXXXXXXXXXXXXXXXXXXXXXXXXXX |
| | | 256-306 | XXXXXXXXXXXXXXXXXXXXXXXXXXXXXXXXXXXXXXXXXXXXXXXXXXX |
| | | 307-357 | XXXXXXXXXXXXXXXXXXXXXXXXXXXXXXXXXXXXXXXXXXXXXXXXXXX |
| | | 358-408 | XXXXXXXXXXXXXXXXXXXXXXXXXXXXXXXXXXXXXXXXXXXXXXXXXXX |
| | | 409-459 | XXXXXXXXXXXXXXXXXXXXXXXXXXXXXXXXXXXXXXXXXXXXXXXXXXX |
| | | 460-510 | XXXXXXXXXXXXXXXXXXXXXXXXXXXXXXXXXXXXXXXXXXXXXXXXXXX |
| | | 511-561 | XXXXXXXXXXXXXXXXXXXXXXXMIYTSQSEEEKNKNYKISFKYINSAKID |
| | | 562-612 | EMVEKDEMYLFQIYNKDFSSYSNGNYKLNTMYWNNIFDSNNIENIIFNIAG |
| | | 613-663 | GATIFFRAKSLERRETHKQGEVLSNKNKDNQKTTSIFSYPLIKNKRYTEDK |
| | | 664-714 | IKLHVPIEINCNSKNLNQRKLNYRVNKNIQNLKEVNIIGISRGTNDLLYAT |
| | | 715-765 | VINSKGEIIEQTSLGKIKNVVFDKSINATREIISDYNKIIDTKEKERENAN |
| | | 766-816 | NRNKTGEELNLEKSIKDIKNGYISQAVNVIANLVKKYNAIIVFEDLNDKKS |
| | | 817-867 | EKIESKIEKSIYRNIQNAVITKLSYLVDKKKKDKFAEGSILNGYQLTYYCE |
| | | 868-918 | QDLVEKQEDSEEKQNGIVFYVSTYMTTNIDPKTGFVNCFSVSLPKSIDGVK |
| | | 919-969 | DFLEKFKEIKFNTKEGYYEFVVNYENISKYTRYFIGEKLSKKEWVICSYGD |
| | | 970-1020 | RIEESKDINTGKTKYKKIDLTKEFKCLFEKFNIGQGKKLKTNIIKFLENLD |
| | | 1021-1071 | LGSGLQAKIKGTNRFINKQSIQQEEFCREFMRLFALILKLQNSDGKESYII |
| | | 1072-1122 | SPVKDSDGKFFDSRKHNEYSSIVPENEISNSAYNIARKGLLIINRIKKTKE |
| | | 1123-1143 | LERIDLNLRDEYWLNFVQNNN |
| 4 | 101, 102, | 1-50 | -------------------------------------------------- |
| | 69, 212, | 51-100 | ---------------------X-----------XX------MEQALSN-- |
| | 255, 237, | 101-150 | -----LLYND--DAQWFKWYDXVRNYLTKKPQDDXKENKLKLNFDNXSLL |
| | 207, 216, | 151-200 | G--GWSDGQEKXKXAXLLKY-XNEXYLCILKTXN-------IFDTSKE-N |
| | 235, 227, | 201-250 | PIYXIXHSXASRLILRN-----LKFQTLAGKGFKGENG------------ |
| | 229, 70, | 251-300 | ---------IXYGXMGKXXPXKAIQCLQKXIK--------ERYVSKYPLL |
| | 105, 170 | 301-350 | EE----------FVXXKYTDKSXFDAXITETLKQCYVCEFEPIDWNLVXE |
| | | 351-400 | KXNNGELXLFXIHXKDYMPKX-----XXGKKXLXTXYWXDXXSE-GSKHQ |
| | | 401-450 | LCA-----GAEIFMRXPVAK----XX--XSKLVNKXDXDGNXXXX-XX-X |
| | | 451-500 | XX-XXXXX-X-XXXXXX-XXXXXXXXXXXXXXEIIKDKRFYGEXKXXFHC |
| | | 501-550 | PIKLNYEAKXY------XPKYAYPEVNXAIXESLQQSDXLQFIGIDRGEK |
| | | 551-600 | HLVYXXTVDKDXEIIXCXDXX----------------------------- |
| | | 601-650 | ---DNINGTDYVQXLXAVANERIIAXKNWQXIGKIKDLKSGYISXVVHRX |
| | | 651-700 | VEEVIKDGN-XXPXAXIVLEDLNTEXKRGRQ-KIEKXVYQNXEXALAKKL |
| | | 701-750 | NFVVDKDAXXXEXGSVXKALQLTPPIXN--YQDIEGKKQFGXMLYTRANY |
| | | 751-800 | TSVTDPATGWRKTIYXKNGKEEDIKKQILEKFSDFGFDGR-DYXFEYT-- |
| | | 801-850 | -----EAHAGX----TWRLYSGKNGKPLPRFXNKKQLQQDKNIWVPEQVN |
| | | 851-900 | VVEILDXLFAXFDKTKSFKXQIE--QGVELX-KIEXRXETAWQSLRXALD |
| | | 901-950 | LIQQIRNXGXEXX---------------DDXFLYSPVRNXXGEHFDTRNH |
| | | 951-1000 | ANNG-XXXXKDXDANGAYNIARKGLIMDXHIKYWXXXGKPX------KXN |
| | | 1001-1050 | DLDLFISDKEWDLWLLDRXXWEXELPXFASRNAKEXXDX----------- |
| 5 | 110, 113, | 1-50 | XXXXXXXXXXXXX-XXX-XXX-X-X-XXXXXXXXX---XX-XXXXX---- |
| | 111, 73, | 51-100 | XX--XXX-X---X-XXX-XX-XXXX-X----XX-X-----X-------X- |
| | 66, 54, 55, | 101-150 | --X--------X----------X------XX-XX--X-----X---X--- |
| | 112, 75, | 151-200 | ---XX--X---X----X--------------XX-X--------------- |
| | 106, 109, | 201-250 | --X--XXXX-X--X-XXX-XX--XX-X-XX-XXXXXXX-XXX--X-X--- |
| | 108, 53, | 251-300 | ---XX--X----XX--------X---X---X-XXX--X--X--XX--X-- |
| | 118, 100, | 301-350 | XX-----X------X----X-X-X-XX-X-XXXX------X--------- |
| | 103, 114, | 351-400 | ------X--X-------X----XXX-X--XX-XXXXXX----X-XXX--- |
| | 56, 67, | 401-450 | -X---X--X---------------X-X----XXXXX---X-AL------- |
| | 162 | 451-500 | -----X--X----X----XFYXXFLXXXXXX-EKXTXGYXXXKKXXEXLI |
| | | 501-550 | TXX-------------XKKDSX-KXXIKXFADXVLXIYQMXKYFALEKKX |
| | | 551-600 | XWX-XPYXLDXXFYXXFDEGXX--XXXDA-X-IVXYYNKXRNYLTKKP-Y |
| | | 601-650 | XXEKXKLNFENGTLLXGWDKNX----EKXX-XXILRKNERYYLGIIKXX- |
| | | 651-700 | NKXFXDE------XXQXYXDIINSGXXEXMVYKQLKDXTKXGX------- |
| | | 701-750 | ------X----X----------------------------FYXXD----- |
| | | 751-800 | ------XXXIXKXLXILXKKQXLXXYXSXQXYXEXX-X-XXX-X--X-XY |
| | | 801-850 | XSXKXFDFXXXXXXEXXX----XXX-X-X--XYKIXFXPXSEEYIXEKNX |
| | | 851-900 | XG-------ELYLFEIHNKDXXXX-----XXXKGTKNLHTLYFXXLFSQE |
| | | 901-950 | NLKHT-------FLKLXXG-AEXFYRXKXXEXKLXXXKXV-X-XX--X-- |
| | | 951-1000 | ---------XXXXXHKRXXEXKIXFHCPIXXN----XXESI--XKFNXKI |
| | | 1001-1050 | NNXLXNNXXXN--IIGXDRGEKXLAYYSVIXQKGXILXTXSLN------- |
| | | 1051-1100 | ------X--DINPVDYXXKLEXRXKERXXQRKXW--QXXXXIKDLKXGYI |
| | | 1101-1150 | SQVXXKXXXLXIX-----XNAIIVFEDLNMRFKXIRGGIEXXXYQQLEKA |
| | | 1151-1200 | LIXKLXXLVFKXXXDPEEXGXLLNXYQLTAPXXSFXXMGK--QTGXIFYX |
| | | 1201-1250 | XASYTSKXXP--XXGXRXNIYLKXEAIE--XAKLXITXFIXIXWDKDKXX |
| | | 1251-1300 | XXFSYXXKDFSEXKKXXXSKXXLYANAX------X-----XVERXXWDRR |
| | | 1301-1350 | YXX---XNXXXXL-XX-XX-------------DXTEXLXDLFXQIGIXYE |
| | | 1351-1400 | NG-XXGXXXXXEX----NENFXKXXIXXLNLIQQIRNXDSXRYX-X-X-- |
| | | 1401-1450 | ------------X---XXNXDFIAXPXXPFXSXXNPYTFXNXXX------ |
| | | 1451-1500 | -----------XXNGDANGAYNIARKGIXXLEXIKQXKXNP------XXX |
| | | 1501-1531 | XXX-XXDLYIXXXXWDKXXQKX---X----- |
| 6 | 104, 107, | 1-51 | --------------------------------------------------- |
| | 260, 253, | 52-102 | --------------------------------------------------- |
| | 91, 99, 92, | 103-153 | --------------------------------------------------- |
| | 262, 271 | 154-204 | --------------------------------------------------- |
| | | 205-255 | --------------------------------------------------- |
| | | 256-306 | --------------------------------------------------- |
| | | 307-357 | --------------------------------------------------- |
| | | 358-408 | --------------------------------------------------- |
| | | 409-459 | --------------------------------------------------- |
| | | 460-510 | --------------------------------------------------- |
| | | 511-561 | --------------------------------------------------- |
| | | 562-612 | --------------------------------------X------------ |
| | | 613-663 | -------X---X---X-X-X----X---XKXKXLFEIYXKDFSX------- |
| | | 664-714 | -----XXXXXXXXXXEXLFSXXNTEXXXFKLXXXAEVFFXEKXDX------ |
| | | 715-765 | --------------X-X-XKKXEKNXKXXXXIIKXXRXTEDXIXFHLPITL |
| | | 766-816 | NF--KGXXKXINXEVXXYIQENEXXXIIGXDXXXKXLXYYGXIDXRGNIYX |
| | | 817-867 | -EKTLXXXGXXXXXGX----KXXXTDYRXKLDIKXXERXXXRRXWTEIEGI |
| | | 868-918 | XDLKXGYXSFVXXEIAXLLVQNNXXIVXEELXGGFKKDR-KXIXKNXYQNL |
| | | 919-969 | XNXXXDKLSYLVXK-----X-KXILXXRNXLXLTPKXXXSEXXGNQXGXLF |
| | | 970-1020 | Y--XDAXXTS-KXDPVXGFXXX----LXLXXSNXKXXXXKXSXXXSIXFNE |
| | | 1021-1071 | EKXXXEFXXXXX--X--XXXKX----XXXXKXDXXXXXXXXEXXXSXXXXX |
| | | 1072-1122 | XXXXXYXXXXSLTEXFX-------------------------------KLF |
| | | 1123-1173 | QDY-XXX--XLXXXIVEXX-KXXXXFXXDXXXLXLXLRNXXXXX---XXDI |
| | | 1174-1224 | XXXXXXXXXXKLXFXX----XX---------X-XKDGDANGAYNIARKGLM |
| | | 1225-1275 | IXEKIXXXXXKXRXNXT------------IXSKXLYXXLQEWDKXXPXXXX |
| | | 1276-1326 | XX------------------------------------------------- |
| | | 1327-1354 | ---------------------------- |
| 7 | 269, 220, | 1-51 | ----XX-X-XXXXXXXX-XXXXXXXXXXXXXX-X-X-X--XXX------XX |
| | 225, 266, | 52-102 | XXXX-X-X-X-XXXX-XX-XXX-XXX-XXX-X--XX-XXXXX-------X- |
| | 186 | 103-153 | -XXX--XXXXXX--XXXX-X-XX-XX---------X-X-XXXXX--X--XX |
| | | 154-204 | X-------X-----X-X--XXXXXXXXX-XXXXXX-XXXXXXXXXXXXXXX |
| | | 205-255 | XXXXXX-XXX-X-XXXX------XX-X-X-XX-----XXXXXXX-X-XXX- |
| | | 256-306 | -XXX--XX-XXXXXX-X-XXXX--XXXXXXXXXXXXX-X--XXXX-X-XXX |
| | | 307-357 | XXXXXXX-XXXXXXXXX-X--XXX-X---X-XX-X--X----XX--X--XX |
| | | 358-408 | --X-XXXXXXXXXXXX-XX-XXXX--XX---------XXX---XXX-XXX- |
| | | 409-459 | -----X--X----X--XXXXX-XX-X--XXX-X-XXX--XXXXXXXXXX-- |
| | | 460-510 | ----X----XXXX---XX------X---X-XXXX--------XX--XX--- |
| | | 511-561 | X----X-XX-X--XX--XXX-X---XXXXXX--X-------XXXXXX-X-X |
| | | 562-612 | XXXXX---X--XXXXXXX-XXXXXX-XXXXXXX--XX-XXTGWVDSKTEKS |
| | | 613-663 | NXGTQFGGYLFRKKNEIGEYDYFLGISSKTXLFRKNEAXIG---XDYERLD |
| | | 664-714 | YYQPKANXIYGSAYEGENSYKEDKKXLNKVIIAXIEQIKXTNIKKSXIXXX |
| | | 715-765 | XXXXNISDDDKVTPSXXLXKIKKVSIDXYNGXLSXXSFQSVNKEVIGNLXK |
| | | 766-816 | TISCLKXKEXFHDLIKKDYQXFTEVQAXIDEXXXXXXXXYXXVSXXELXXX |
| | | 817-867 | XXDKXKPLXLFXIXNKDLXXAXXXXXXXXXKXRGXXNLHTMXFKALMSGXQ |
| | | 868-918 | XXXDXGSGXXFYRXXSXXXXKXTHPAXXXIXXXNXXXKDXXXXFXYDXXKX |
| | | 919-969 | RRXXEXKFXFHLSIXQNYXAXX-XXSXXXNXXXXXYXRXXXXXXIXGIDRG |
| | | 970-1020 | ERNLLYXSXIDXXGNIVXXXXXXXIXXXXNXXXXXXXXXXXXXXXXXTXYH |
| | | 1021-1071 | XLLDKREKXXXXNXXXWXXXXXIKXLKXGYXSQXXXXIXXLMXKYNAIIXX |
| | | 1072-1122 | EDLXXXFXXXXXXXXKXVYQXFEXXLXXKLXYLVXKXXPXXEXGGXXXAXQ |
| | | 1123-1173 | LAXXXTXXXXXXKQXGFXFYXPAWNTSXIDPVTGFXXLLXPKXXXXKXAXD |
| | | 1174-1224 | FFGXFXXIXXNXXXXXFEFXXXYXXFXXXXXXXXXRWTXCTXGXXXXXXXX |
| | | 1225-1275 | KXXXNXXXYXXXXXTXXXKXLFXXYXIDYXXGNXXXEXXXXXNXXFXXXXX |
| | | 1276-1326 | XXXXXXXXXXXXXXXXXXXXXXXXXXXXXXXXXXXXXXXXXXXXXXXXXXX |
| | | 1327-1365 | XXXXXXXXXXXXXXXXXXXXXXXXXXXXXXXXXXXXXXX |
| 8 | 194, 203, | 1-51 | --X--XX-XXXXXXXXXXXXXXXXXXXXXXX-------------------X |
| | 115, 211, | 52-102 | --XXX-XX-XXX-XXXXXXXXXXXXX-XXX--XX-----------XX-XXX |
| | 273, 249 | 103-153 | X--XX--XXXX--XX--X----XXXXXXXX-XXXX-X-X------------ |
| | | 154-204 | ---------X-X-XX-X-XX--X--X---XXXXXXX-X-XXXXXXXXXXXX |
| | | 205-255 | X-XXXXXXXXXXXXXXXXXXXXXXXXXXX-XXX------XX--X-XX-X-X |
| | | 256-306 | XX-XXX-X-XXXX-XX-XXXX--XXXXXXXXXX-XXXX---XXXXXXXXXX |
| | | 307-357 | XXXXXXXX--XXXX--XXXXXXXXXXXXXXXXXXXXXXXXXXXXXXXXX-X |
| | | 358-408 | X--XX--------X---XX-X-X-XXX-XXXXXXX-XXXX-XX--XXXXXX |
| | | 409-459 | -XXX-X--X--XX---XX-X--XX-----XXXX-XXXNRKKXXXSXXSXSI |
| | | 460-510 | XXIXEYXKEFYTXKXXTDEKSVIDXFXXXGXXENGTX-LFEXXEXAYXXXK |
| | | 511-561 | DXLNXXXXGNXRXEXXXDEXXXIKXLLDXLKKLQXFXXXXXGSGXESXXDX |
| | | 562-612 | AFYXXXXXLMEVXXEXXPLYNXVRNYLTQXPYSEXKXKXNFEXSXXXXGWD |
| | | 613-663 | XXXEXXXXXVIXXKDGLYXLAIXNKXXXXXLXXDXIKSXGXCYEKXXXXXI |
| | | 664-714 | XXXXXXXXXXXXXXXFXRXXXXXFXXAXXXXXXXXCXXXXXXXEGKXXXXX |
| | | 715-765 | XXXXX-XX-XXLXXLIDXXKXXFXXXEXXXXXYKDFGFKWXXXSEYXSXXE |
| | | 766-816 | FXNDIXRXXYXXKFXRXSXSYXNXLVKXGKIYLFXIYNKDFSPXSKGTPNX |
| | | 817-867 | HTXYXXALFSEXNLXXXXXXLNGXAEXFYRKXSLEXXAKXMXXXHHXXXXK |
| | | 868-918 | XXXN-XX--XX-YXIXKDXRYTEDKYFLHVPITLNFKAVXDNKXXIKVXEX |
| | | 919-969 | IKEXXI--EHXIGIDRGERNLLYXSXIDXKGNIVXQLSLNEIXNXXXX--E |
| | | 970-1020 | MXDYHAXLDKREXEXDEARXXWQTIEGIKNLKEGYXSQVVHIXSKXMXXYX |
| | | 1021-1071 | AIXVLEDLNXGFXRSRQKVEKQVYQKFEXMLIXKLNXLVDKKKPVSEA--- |
| | | 1072-1122 | -XGLXNAYQLXDEYKGFQKVGK-QXGFLFYVXAWNTSKIDPXTGFVXLXXA |
| | | 1123-1173 | KYENIDXAKKXXSXFDEIRYNXEKDXFEFVIXDYSKFXXKAXGTQXX-WTL |
| | | 1174-1224 | CXFGDRIVTXRXNNXXGXWXHKXVKLXXEFKNLFDQXNIDYTKS-XLKEXI |
| | | 1225-1275 | LSQNXA----XXXX----------XXLDLXGLMLQMRNSXP---XTXEDXX |
| | | 1276-1326 | XSPVXXDXGEFXDSRXXXXEDNLPIXADANGAYNIARKGLWXXXQIXXXDN |
| | | 1327-1357 | LEKVXLAXXXXXWLCXAQQKXXXXX------ |
| 9 | 132, 133, | 1-50 | -------FXXFTNLYPXSKTLRFELXPXGKTXENIEKXGILXXDEHRAES |
| | 124, 152, | 51-100 | YKKVKKIIDEYHKXFIDXXLXXFXLX----X-----XXLEEYXXLYX--X |
| | 151, 72, | 101-150 | KXEXXXKX-FXKXQXNLRKQIVXXLTKDXXYK--------------IXKK |
| | 206, 24, | 151-200 | ELIXEDLXXFVXX--------------------------XXXXLIXEFXD |
| | 25, 68, | 201-250 | FTTYFXGFHENRKNMYSAEEKSTAIAYRLIHENLPKFIDNMXXFXKIAX- |
| | 195, 232, | 251-300 | -XVAEXFXXIYXXXXEXXNX-----IXEMFXLDYXXXXLTQKQIXVYNAI |
| | 30, 12, | 301-350 | IGGXT-XX-XKKIKXINEYXNLYNQQQKD--XRLPKLKPLXKQILSDREA |
| | 182, 252, | 351-400 | XSWLPEEFXSDXEMLXAIXEXYXXLXX------------XKXLLXXLXXY |
| | 259, 222, | 401-450 | DLXGIXIXNDLQLT-DISQKXFGXWXVIXXAIKX--X--XP---XXKEXX |
| | 251, 190, | 451-500 | EXYEERISKXFKXXKSFSIXYXN-XXX-----------X--IEDYFATLG |
| | 209, 239, | 501-550 | --AVNTXXXQKENLFAQ-IENAYTDAXXLL--XXYPTXXNLSQDKXNVAK |
| | 250, 192, | 551-600 | IKALLDAXKDLQHFXKPLLGXGDEXXKDERFYGEXXXLWXELDX-XTPLY |
| | 205, 71, | 601-650 | NKVRNYXTRKPYSTEKIKLNFDNS--QLLGGWDXNKEXDNTSVILRKDGL |
| | 76, 215, | 651-700 | YYLXIMDKKSNXXXXX-XXXXXDG----------XCYEKMDYKL--LPGA |
| | 93, 264, | 701-750 | NKMLPK-------------------VFFSX-------------------- |
| | 208, 267, | 751-800 | ---SRIXEFXPSEXLLXX---YKXXT--------HKKGXXFXLXDCHXL- |
| | 183, 265, | 801-850 | --------XDFFKXSIXKHEDWX------XFGFKFSDT--XTYEDXSGFY |
| | 193, 210, | 851-900 | REVEQQGYKLSFXXVSVSYIDQLVXEGKLYLFQIYNKDFS---------E |
| | 89, 263, | 901-950 | YSKGTPNXHTLYWKMLFDERNLXXVVYKLNGQAEVFXRKXSIKX----PT |
| | 268, 270, | 951-1000 | HPANXPIKNKNXXNKKXEST--FEYDXIKDXRYTVDKFQFHVPITXNXKA |
| | 213, 224, | 1001-1050 | XGXX---NINPXVXXYXRXX-XDTHIIGIDRGERHLLYLSXIDLKGNIXX |
| | 218, 257, | 1051-1100 | QFXLNEIXNEYXGNTYKTNYHDLLXKXEGERXEARXSWQTIENIKELKEG |
| | 36, 178, | 1101-1150 | YLSQVXHKISKXMVXYNAIVVLEDLNMGFMRGRQKXEKQVYXKFEKMLID |
| | 187, 244 | 1151-1200 | KLNYXXDKXXDADEPGGLLHAYQLTNKFESFX--------XLGKQSGFLF |
| | | 1201-1250 | YIPAWNTSKIDPVTGFVNLXDTRYEX-VXKAXSFFSKFXSIRYNXEKXWF |
| | | 1251-1300 | EFXFD-YNDFTTKAEGTRTXWTLCTXGTRIETFRNPEKNXQWDXEEXNLT |
| | | 1301-1350 | DEFKXLFXKYGIDING--NLKEAIXX-------QTXXXFFXELLHLXKLX |
| | | 1351-1400 | LQMRNSITX---XXVDYLXSPVAXENGXFXDSRX-------XXLPENADA |
| | | 1401-1449 | NGAYNIARKGLWVIRXIXXXX-DXEKLKLA-IXNKEWLQFAQXKPYLND |
| 10 | 158, 230, | 1-50 | ----------XXKKIDXXTNXYXVSKTXRFXLIPVGKTXXNFXXKXXLEE |
| | 234, 140, | 51-100 | DEKXXEDYXKXKEIIDRYXRXXIXXVLSK--------XXLDXLKDYAXLY |
| | 164, 142, | 101-150 | YXXN-TDADXK-KXXECESKLRKEIXKXXKNXXEYNKLFNKKLIEXXLPX |
| | 141, 180, | 151-200 | XLKN----EDEKEVVASFKNFTTYFTGFFTNRKNMYSDEEKSTAIAYRCI |
| | 77, 78, | 201-250 | NENLPKFLDNVKAF--EKAXSKLXKXAIXXLXETXSGLCGTXLXDVFTVD |
| | 167, 13, | 251-300 | YFNFVLXQSGIDXYNXIIGGYTTSDGTKXKGXNEYINLYNQ---XVXKXX |
| | 35, 179 | 301-350 | KXPXLKXLYKQILSESEXVSFIPXKFEXDNELLSAVXEFYAN-X-----X |
| | | 351-400 | XLKKAIDETKLLFXNLDX--XSLNGIYXKNDXSVTNXSNSMFGSWSVIXD |
| | | 401-450 | LWNKXYDS--VNSNXXIKDIEKYEDKRKKAYKKXKSXSXSXXQVLISXS- |
| | | 451-500 | NXEX-XKSXVDYYKXSLXELXDXIXXKYXEAKXLFXXXYXNX--KXLKND |
| | | 501-550 | DKAXELIKNFLDSXKEXEKFIKPLSGTGKXXEKXELFYGEFTPLLDXXSX |
| | | 551-600 | IDSLYXKVRNYVT--XKPXSTDKIKLNFGNPQXLXGWDRNKEXDYXAVLL |
| | | 601-650 | XKDGKYYLAIXDKSNXKIXENIXXXDXX-SDCYEKIIYKLLPGPNKMLPK |
| | | 651-700 | VFFS--------------------XKXXXXFXPSDEILXIXKXGTFKK-- |
| | | 701-750 | ------------GDXFXXDDCHKLIDXYKESFKKXPX-------WSXXXF |
| | | 751-800 | KFKDTXEYNDISEFYNXVAXQGYKIXXXKIPTSXIDKLVXEGKXYLFQXY |
| | | 801-850 | NKDFSXXSKGTPNLHTXYFKMLFDERNLEXVVYKLNGXAEMFYRPASIKX |
| | | 851-900 | D-KIXHPXNXPIKN---KNPLNDKKXST----------FPYDXXKDXRXT |
| | | 901-950 | KDQFSLHXPITMNFK---APDXXXINDDVRXLLKSCXNNYXIGIDRGERN |
| | | 951-1000 | LXYXSVXDSNGXIXEQHSLNIIINEYXGKTYETXYHXXLDXXEKERDEXR |
| | | 1001-1050 | XNWKTIEXIKELKEGYISQXVHXICXLVVKYDAIIXMEDLNFGFKRGRTK |
| | | 1051-1100 | -XEKQVYQKFEKMLIDKLNYXVDKK----LDPEEEGGLLKAYQLTNKFES |
| | | 1101-1150 | FXKXGKQXGXIFYVPXWLTSKIDPXTGFXXLLYPKYE-XXDKAKDXISRF |
| | | 1151-1200 | DXIRYNA------XEDXFEFDIDYDKFPRTAXDYRKKWTXCTNGERIEXF |
| | | 1201-1250 | RNPXKNNEWDYXTXILTEXFKELFDNYSIXYXDX-DDXKXXILSXTKXKF |
| | | 1251-1300 | FEDXXKLLRLTLQMRNSXPG-----TDXDYXXSPVKXKNGNFYDSSKYXE |
| | | 1301-1350 | KXK----LPXDADANGAYNIARKGLWIIEQXKKXD--DVLXKEKLAISNX |
| | | 1351-1365 | EWLEXXQKNXX---- |
| 11 | 62, 121, | 1-50 | ----XSXFQEFXXXYXLSKTLRFELXPXGKTLEXIXAKG------XXLQD |
| | 61, 82, 4, | 51-100 | EKRAKDYXKVKQIXDXYHXDFIEEXLSX--XXXSEXLLQXXYDVYLK--- |
| | 29, 39, | 101-150 | ------KKSXXDD-LQKXXKXAQDXLXKXIVKXIXX--KGKXXFX--XXX |
| | 117, 58, | 151-200 | XXAKKXXKXDX--X-LXKXXKQQED-X--------X--X-DEALEIIKSF |
| | 57, 40, 27, | 201-250 | XXFXTYFTGFHENRKNMYSXEDXHTXIAYRXXXXNLPXFXXNLXIXESXK |
| | 7, 6, 31, 9, | 251-300 | XKXPELXYXEXIX-X--XXX---------X-NXXXFXLXEXFEXXXXNNX |
| | 28, 38, 37, | 301-350 | LXQSGITXXNTIIGGKXVNGXXXKXKGINEXIN-LYXQQIXDKS---XIA |
| | 26, 34, | 351-400 | KXXXLHKQILSDGEXVSFXXDKFXD------DSEVCQXVXEFYR------ |
| | 129, 96, | 401-450 | --XXX-HXETXFLXVQXLFA-XXDXDXXKIYVKNXKSLXXLSXQVFG--D |
| | 181, 168, | 451-500 | XSXXGXAXDXYYTXXVAPKFNDXXXKXKTDNXX-XX-XEKXXFKKGXHSL |
| | 47, 261, 2, | 501-550 | XTXEQAXEXYXXHHDDXX----XXX--XXXXYXKXNFAAIXX------XX |
| | 46, 22, 63, | 551-600 | XIXKIHNNLXXIKGFLEXEXXKXERQLXKEKX--------XKQXKELLDN |
| | 42, 44, 43, | 601-650 | TXNXLHFLKLXHXKXXXXX-TLLXKDEXFYGXFEELYDELAXIVPLYNKV |
| | 45, 20, 51, | 651-700 | RXYXXQKPXSXEKXKLNFXNXTLXNGWDLNKEK-DNXXXXXXKDXKYYLX |
| | 52, 64, 11, | 701-750 | XXXKXX--------------XKXFDNXPN--------------------- |
| | 84, 116, | 751-800 | -GKEXYXKXVYKLLPGXNKMLP---------------------------- |
| | 21, 14, | 801-850 | ------KVFFXXX------------------------------------- |
| | 119 | 851-900 | -------------------------------------------------- |
| | | 901-950 | ---------NXKYYNPSXX---------X--XXX----XX-XXXNX---- |
| | | 951-1000 | ----XPXXXKXX--DXFN--XXDCXKXIDFXKXSIXKHPEX-WX-XFGFX |
| | | 1001-1050 | FSXTSSYXXXXXFYREVENQ--GYKXXFXXIXXXYIDXLVXQGKLYLFQI |
| | | 1051-1100 | YNKDFSXXXXG--XPNLHTLYXKALFXERNLQXXXY------KLNGEAEX |
| | | 1101-1150 | FYRKXSXX-XXXXXHXAXEXXXNKNXDNPKKX------------------ |
| | | 1151-1200 | -------------------X-XX-X-X-YDXIKDKRXTXDKFXXHXPITM |
| | | 1201-1250 | NFXXXG-XXXXXFNXXXNXXXXXXAX-DVXXXXIDRGERHLXYXTXXXXK |
| | | 1251-1300 | GXIXXQXXXNXIGXDXMXX----XXXXXXYHXXLXXXEXXRXXARXXWXX |
| | | 1301-1350 | IXXIKEXKXGYLSXVVHXIXXLXXXYNAIVVXEDLNFGFKRGRFKVEKQX |
| | | 1351-1400 | YQXXEXXLIXKLNXLVXKDX-XXDXXGXXXXAXQLTXXFXXXKKXG--KQ |
| | | 1401-1450 | TGXXXYVPAXXTSKIXPVTGFVXXLX--PXYEXXXXSQXFFXKFDKICYN |
| | | 1451-1500 | XDKGYFEFSFD---------YXXFG-DKAXXXXXKWTIXSXGXXXXXXXX |
| | | 1501-1550 | XXXNXX-------------XDTRXXXXXXELXXLXKXYSIXYXXXX--XX |
| | | 1551-1600 | XXXXICXXXDKXFXXXLXXLLXTXLXXRXS-----XXXXXXDXXXSPVAX |
| | | 1601-1650 | XNGXFFXXX---------XXLAXXX----XPQXADANGAYHIXLKGLXLL |
| | | 1651-1700 | NRXKX---XXDXKKXXLXIXNXXXXXFXQNRX------------------ |
| | | 1701-1710 | ---------- |
| 12 | 219, 90 | 1-51 | XXXXXXXXXXXXLXXVSKTLRFELKPIGXTKEYXEXXXIXXXDXXXXEXXX |
| | | 52-102 | XVKXXXDXYHKXFIEEXLXDXXXXXXXXXLXXXXXLYXXXXXXXXXXKXFE |
| | | 103-153 | XIXXXLRKXISXXFKKXXXYXXLFXKEXIKNXLXXXXXXNXEXXXXXXXFX |
| | | 154-204 | DFTTYFTGXNQNRXNMYSXEXKXTAIAYRLIXXNLPXXXXNXKXFXXXXXX |
| | | 205-255 | XXXIKKQIXXXXNXXXXXYXXXXXXXXXXXXXXXXXXXXQXXIXXYNXXIX |
| | | 256-306 | GXXXXEXXKXQGXNEXXNLXXQFKXXXXPKXKXLXKQILSDXXSXSFXXXX |
| | | 307-357 | XXNDXEXXXSIXXXXXXXXXXXLXXXEXXXXXXXXNXXXYXLXXIXXXNDX |
| | | 358-408 | SLTXXSXXXYGDWXXXXXXXXXXXXXXYTGKXKKXXXKYXEXKXKXLKXIK |
| | | 409-459 | XXSIXXXDXLXXXXXXXXXXXXXXXEXXKNXXXXXXXXXXXXXXEXXXXXX |
| | | 460-510 | KXXXXXXNXLXKXXXXIXXIKXXLDSIKXXQXFXKXLXXXXXXXXXDXXFY |
| | | 511-561 | XXLXXXYXXLXXIXPLYNKVRNYXTXKPXSTEKXKLNFXXXTLLXGWDXNK |
| | | 562-612 | EXXNLGXXFXKDXXYXLGIXNXXNXKIXXXXXXXXXNXXYKKXXYKXXPGP |
| | | 613-663 | NKMLPKVFFSKSRXXEFXPSEEXLXXXXXXXXKKGXXFXXXXCHXLIXFFK |
| | | 664-714 | XSIXKHEXWSXFXFXFXXTXXYXDISXFYXEVEXQGYKITXXXIXXXYINX |
| | | 715-765 | LVDEGXLYLFQIYNKDFSXYSKGXPNLHTLYWXXXFXXXNLKDVXYKLNGX |
| | | 766-816 | AEIFYRKXSIXXXXXXXHPXNXPXXNKXPXNXKKXSXFXYDXXKDXRYXXD |
| | | 817-867 | KFQFHVPITMNFKAXGENXXNXXXXXXIXXXDXXHIIGIDRGERXLLYXXV |
| | | 868-918 | IXXXGXIVEQXXLNXXXXXXXXXXXHXXDYHELLDXXEKEXXXARXXWXTI |
| | | 919-969 | XXIKELKEGYXSQVXHXIXXLXXKYNAIVVLEDLNXGFKXXRXKXEKXVYX |
| | | 970-1020 | KFEXMLXXKLXYLVXKXXQXXXEXGXXLXAYQLXXXXXXXXXXGXQXGXXX |
| | | 1021-1071 | YXPAWXTSKIDPXTGFVNLFXTKXXXXEXXXXFXXKFXNIXXXXXXXXXXF |
| | | 1072-1122 | XFXYXXXXXXXXGXRXXWXXXSXGXRXXXFRNXXKNXEWDXXXVXLTXEFX |
| | | 1123-1173 | XLFXRYXXXXXXXXXXXXSXXXXXXXXAVXXXDXXXXFXXLFXLXVQXRNS |
| | | 1174-1224 | XXXXXXDXXXSPVKNXXXXFYXSXXXSXXLPXDADANGAYNIAXKGLXLVX |
| | | 1225-1255 | XIKXSXKXXXXKIXXXIXNXXWLXFXQEXXX |

TABLE 2
Conserved sequences identified by aligning
272 MAD7 GIG- nuclease homologs with clustalw.

| SEQ | | | Number of | |
|---|---|---|---|---|
| ID NO | Sequence | Cluster | sequences | Position |
| 815 | EEVXKDNNFYAELEEIYDELXP | 1 | 104 | 630-652 |
| 816 | SKNFDIKFCX | 1 | 104 | 891-901 |
| 817 | CIAKHPXWKNFGFKFS | 1 | 104 | 915-931 |
| 818 | EENLKXIVLKLNGEAELFXR | 1 | 104 | 1034-1054 |
| 819 | KSSIK | 1 | 104 | 1058-1063 |
| 820 | IXEQKSFNIVNG | 1 | 104 | 1217-1229 |
| 821 | YGFKRGRF | 1 | 104 | 1299-1307 |
| 822 | KVERQVYQKFETMLINKLNYLVFKDRX | 1 | 104 | 1308-1335 |
| 823 | MEQALSN | 4 | 14 | 92-99 |
| 824 | LLYND | 4 | 14 | 106-111 |
| 825 | DAQWFKWYDXVRNYLTKKPQDDXKENKL | 4 | 14 | 113-152 |
| | KLNFDNXSLLG | | | |
| 826 | IFDTSKE | 4 | 14 | 192-199 |
| 827 | LKFQTLAGKGFKGENG | 4 | 14 | 223-239 |
| 828 | ERYVSKYPLLEE | 4 | 14 | 291-303 |
| 829 | GSKHQLCA | 4 | 14 | 396-404 |
| 830 | GAEIFMRXPVAK | 4 | 14 | 409-421 |
| 831 | YQDIEGKKQFGXMLYTRANYTSVTDPAT | 4 | 14 | 731-791 |
| | GWRKTIYXKNGKEEDIKKQILEKFSDFG | | | |
| | FDGR | | | |
| 832 | TWRLYSGKNGKPLPRFXNKKQLQQDKNI | 4 | 14 | 816-874 |
| | WVPEQVNVVEILDXLFAXFDKTKSFKXQ | | | |
| | IE | | | |
| 833 | KLFQDY | 6 | 9 | 1120-1126 |
| 834 | XXTGWVDSKTEKSNXGTQFGGYLFRKKN | 7 | 5 | 600-654 |
| | EIGEYDYFLGISSKTXLFRKNEAXIG | | | |
| 835 | IEDYFATLG | 9 | 49 | 492-501 |
| 836 | XTPLYNKVRNYXTRKPYSTEKIKLNFDN | 9 | 49 | 596-625 |
| | S | | | |
| 837 | XCYEKMDYKL | 9 | 49 | 685-695 |
| 838 | LPGANKMLPK | 9 | 49 | 697-707 |
| 839 | XTYEDXSGFYREVEQQGYKLSFXXVSVS | 9 | 49 | 841-891 |
| | YIDQLVXEGKLYLFQIYNKDFS | | | |
| 840 | XLGKQSGFLFYIPAWNTSKIDPVTGFVN | 9 | 49 | 1191-1227 |
| | LXDTRYEX | | | |
| 841 | EDEKEVVASFKNFTTYFTGFFTNRKNMY | 10 | 14 | 159-215 |
| | SDEEKSTAIAYRCINENLPKFLDNVKAF | | | |
| 842 | SDCYEKIIYKLLPGPNKMLPKVFFS | 10 | 14 | 630-655 |
| 843 | KNPLNDKKXST | 10 | 14 | 868-879 |
| 844 | XEKQVYQKFEKMLIDKLNYXVDKK | 10 | 14 | 1052-1076 |

### 6.13.2. Example 2: Functional Analysis of Nucleic Acid-Guided Nucleases

### Methods for Testing In Vitro Function of GIG-Nucleases

[0200] The functional properties of novel GIG-nucleases are tested using an E. coli derived in vitro transcription-translations system previously described by Maxwell et al. (Methods. 2018 Jul. 1; 143: 48-57). In brief, DNA sequences encoding the novel GIG-nuclease and the cognate guide RNA targeting a DNA sequence of choice are placed under the control of strong bacterial promoters and expressed in a cell-free system (available commercially from Arbor Biosciences, Ann Arbor, MI). Nuclease DNA sequences are amplified by PCR or synthesized de novo using Gibson Assembly, gene blocks, oligonucleotides, or similar methods. The nuclease DNA sequences are wild type or codon optimized. Specifically, transcription of the nuclease is driven by the T7 promoter (5′-TAATACGACTCACTATAG-3′), which is transcribed by T7 RNA polymerase expressed in the same reaction under the control of the constitutively active p70a promoter (e.g., plasmid pTXTL-P70a-T7 map from Arbor Biosciences). Expression of the guide RNA is placed under the control of the P70a promoter and proper transcriptional termination is ensured by the presence of a strong transcriptional terminator. Alternatively, the template for gRNA transcription is omitted from the in vitro transcription-translation reaction and a synthetically synthesized gRNA is instead added after completed expression of the GIG-Cas nuclease. In addition, target DNA is added to the reaction either in the form of a circular plasmid or a linear DNA fragment. Expression of a functional nuclease and its cognate guide RNA will result in cleavage of the target DNA which can be detected by various analytical methods including mobility shift analysis on an agarose gel, by capillary electrophoresis or on microfluidic systems. Alternative readout methods include quantitative PCR.

[0201] For productive cleavage by CRISPR/Cas nucleases, a bona fide PAM (protospacer adjacent motif) sequence is required in the immediate vicinity of the protospacer target sequence. In the absence of a permissible PAM sequence, typically 3-5 nucleotides in length and positioned immediate adjacent to the protospacer sequence or a few nucleotides removed, no cleavage will occur. In the case of novel GIG-Cas nucleases for which the PAM sequence is originally unknown, the above described in vitro transcription-translation system is used, after modifications to the target sequence, to determine the recognized PAM sequences. For this purpose, a randomized stretch of nucleotides is introduced in a region immediately next to the protospacer sequence. Typically, such a region consists of 6, 7, 8, 9 or 10 randomized nucleotides. By subjecting the aforementioned library of randomized PAM sequences to GIG-nuclease digestion, sequences corresponding to permissible PAM nucleotide variants and locations are cleaved leaving sequences with non-conforming PAM variants undigested. By the means of high-throughput DNA sequencing (“next generation sequencing”, or NGS, manufactured by Illumina) the PAM profile is determined as the difference is abundance of each PAM sequence variant between a digested sample and a control devoid of a guide RNA or supplemented with an irrelevant guide RNA.

[0202] In certain instances where are a particular PAM sequence is prevalent for e.g., a specific subtype of nucleases, a screen based on nuclease-mediated cleavage and inactivation of a reporter gene is employed. For example, many members of the Cas12a family of proteins (Class II, Type V nucleases which includes MAD7) canonically recognize PAM sequences with a consensus motif of TTTV (where V=A, C or G) immediately 5′ of the protospacer sequence. In such cases a precursory nuclease activity screen as described by Maxwell et al. (Methods. 2018 Jul. 1; 143: 48-57) and above can be designed to rapidly detect nuclease activity for a large number of novel nucleases. In one implementation, the reporter gene encodes a fluorescent protein, such as GFP or RFP. A PAM sequence motif corresponding to the tetranucleotide TTTA, TTTC or TTTG is identified within the coding region of the gene, preferably in proximity to ATG start codon, or immediately upstream of the open reading-frame and a guide-RNA is designed to facilitate cleavage of the target gene. Using the in vitro transcription-translation method of Maxwell et al, a novel GIG-nuclease, its cognate reporter-targeting guide RNA and the reporter protein are expressed in a test tube and the accumulation of reporter protein and the associated fluorescent signal is monitored over time (every 10 min for 18 hours). Cleavage of the reporter gene results in reduced fluorescence compared to a negative control lacking the target-specific guide RNA or supplemented with a non-targeting guide RNA, including guide RNAs with a scrambled spacer. Alternatively, the screen can be established in bacterial cells or any other cellular system, i.e., to implicitly test functionality in mammalian cells, using fluorescent reporter proteins or other commonly used reporters such as beta-galactosidase, luciferase or antibiotic selection markers. This system is suitable for screening hundreds of novel nucleases for activity and can be used as an initial screen of candidate nucleases when a presumptive PAM sequence is available. With the appropriate modification this system can also be used to assess relative activities and kinetic properties of nucleases.

[0203] In order to have a functioning targetable nuclease complex, a nucleic acid-guided nuclease and a compatible guide nucleic acid are needed. To determine the compatible guide nucleic acid sequence, specifically the scaffold sequence portion of the guide nucleic acid, multiple approaches are taken. First, scaffold sequences are looked for near the endogenous loci of each nucleic acid-guided nuclease. When no endogenous scaffold sequence is found, scaffold sequences found near the endogenous loci of the other novel GIG-Cas nucleases are tested.

[0204] A homology template is generated to assess the functionality of the nucleic acid-guided nucleases and corresponding guide nucleic acids. The homology template comprises a mutation relative to the target sequence. The mutations are flanked by regions of homology (homology arms or HA) which would allow recombination into the cleaved target sequence. Guide nucleic acids comprising various scaffold sequences are tested.

[0205] An expression construct encoding the nucleic acid-guided nuclease is added to host cells along with an editing polynucleotide as described above. Editing efficiency is determined by qPCR to measure the editing plasmid in the recovered cells in a high-throughput manner. The editing polynucleotide can comprise a selectable marker to allow easier selection of edited cells.

### Identification of Compatible PAM Sequences

[0206] To elucidate the permissible PAM variants for novel Cas proteins the in vitro system of Maxwell et al. (Methods, 2018) was employed. Briefly, a plasmid containing the Cas protein ORF under the regulation of the T7 promoter (e.g., FIG. 4 and SEQ ID NO: 814), a plasmid containing a target gene, MRT gene (NM_001531.2) with a randomized 10-mer cassette placed immediately 5′ of a protospacer (5′-sequence, and a synthetic DNA molecule encoding a cognate guide RNA (5′-gggcgtttcggatcccatccatgggg-3′) under the control of the P70a promoter were added to the in vitro transcription-translation system (Arbor Biosciences) and incubated for 18 h at 29° C. to allow expression of the nuclease and guide RNA and cleavage of the target DNA. Example guide RNAs are shown in Table 3 and example target MR1 sequences are shown in Table 4.

TABLE 3
Examples of guide RNAs for novel
GIG- nucleases targeting the MR1 gene.

| Cas protein | gRNA sequence |
|---|---|
| MAD7 | GTCAAAAGACCTTTTTAATTTCTACTCTTGTA |
| | GATgcctgggcgtttcggatccca |
| GCA_000156415.1_ | GTCTAAGAACTTTAAATAATTTCTACTGTTGT |
| DS995364.1 | AGATgggcgtttcggatcccatccatggggtc |
| GCA_003436785.1_ | GTTAAGTAATATAGAATAATTTCTACTGTTGT |
| QSQP01000003.1 | AGATgggcgtttcggatcccatccatgggg |
| GCA_002633275.1_ | GTCTATAAGACGAACTAAATTTCTACTATTGT |
| NWBO01000064.1 | AGATgggcgtttcggatcccatccatggggtc |
| GCA_000988655.1_ | GTCTAACGACCTTTTAAATTTCTACTGTTTGT |
| CP011377.1 | AGATgggcgtttcggatcccatccatggggt |
| GCA_002372885.1_ | ATCTACAACAGTAGAAATTTAATTAGTAGGTC |
| DFJA01000037.1 | AAACgggcgtttcggatcccatccatgggg |
| GCA_902799665.1_ | ATCTACAACAGTAGAAATTTAGTATGAAGTTC |
| CADCBK010000014.1 | AAACgggcgtttcggatcccatccatgggg |

Upper case = repeat sequence;
lower case = spacer sequence targeting the MR1 gene.

TABLE 4
Examples of target MR1
sequences with highlighted PAM sites.

| Target | |
|---|---|
| description | Target sequence |
| MR1 target | GACGCACTCTCTGAGATATTTTCgcctgggcgt |
| sequence | ttcggatcccaTCCATGGGGTC |
| for MAD7 | |
| MR1 target | GACGCACTCTCTGNNNNNNNNNNGCCTGGGCGT |
| sequence, | TTCGGATCCCATCCATGGGGTC |
| 5′ N₁₀ PAM | |
| MR1 target | GACGCACTCTCTGAGNNNNNNNNGCCTGGGCGT |
| sequence, | TTCGGATCCCATCCATGGGGTC |
| 5′ N₈ PAM | |
| MR1 target | GACGCACTCTCTGAGATNNNNNNGCCTGGGCGT |
| sequence, | TTCGGATCCCATCCATGGGGTC |
| 5′ N₆ PAM | |

Upper case, bold/underlined = PAM sequence, or randomized PAM screening cassette;
lower case = 21 base pair protospacer sequence for MAD7.

[0207] A negative control devoid of the guide RNA was run in parallel. Following the incubation, a DNA region encompassing the PAM cassette was PCR amplified and subjected to high-throughput sequencing. The nucleotide preference of the GIG-Cas nuclease for each position of the putative PAM cassette was computed as the relative difference in abundance between the guide RNA containing and deficient samples. Using this assay, the PAMs for GIG-1 (SEQ ID NO: 123), GIG-4 (SEQ ID NO: 254) and GIG-5 (SEQ ID NO: 28) were determined to be TTTV.

[0208] For higher throughput, a similar in vitro transcription-translation system was implemented in combination with a green fluorescent protein (GFP) reporter gene and evaluated the activity of 43 GIG-nucleases. The chosen 43 GIG-nucleases were representative of the protein sequence diversity of the full set (SEQ IDS 2-273) of GIG-Cas nucleases, i.e., the sequences analyzed represented a diverse sampling of the clades of GIG-Cas nucleases (i.e., FIG. 2). The reactions were essentially set up as described above, except in this instance the target gene encoded GFP and the guide RNA spacer sequence was chosen to reside in immediate proximity of a naturally occurring TTTC PAM sequence within the open-reading frame of the GFP protein. By cleaving the target gene close to the ATG start codon, reduced GFP activity was expected in a sample containing a target specific guide RNA compared to a control devoid of a guide RNA. In a successful experiment, a distinct reduction in fluorescence was observed when the reactions were supplemented with a GFP-targeting guide RNA, with some GIG-nucleases demonstrating a more pronounced effect than others. As described above for the MR1 targeting assay, following the incubation, a DNA region encompassing the PAM cassette was PCR amplified and subjected to high-throughput sequencing. The nucleotide preference of the GIG-Cas nuclease for each position of the putative PAM cassette was computed as the relative difference in abundance between the guide RNA containing and deficient samples.

[0209] FIGS. 5A-5C show exemplary GFP reporter results of the PAM screen for GIG-1 (SEQ ID NO: 123), GIG-4 (SEQ ID NO: 254), GIG-3 (SEQ ID NO: 79), GIG-2 (SEQ ID NO: 43), and GIG-5 (SEQ ID NO: 28) from the present invention. FIG. 6 shows quantitative sequencing heatmap results for 31 example GIG-enzymes. FIGS. 7A-7D show sequence logos which summarize the heatmaps for 31 example GIG-enzymes. Table 5 provides the consensus, dominant PAM sequences identified for GIG-nucleases described herein. Though most GIG-nucleases of the present invention show similarities with previously disclosed Cpf1 nucleases, many of the GIG-nucleases show quantitative or qualitative differences from known PAM sequences. For example, GIG-2, GIG-20, and GIG-27 allow for cytosine nucleotides at the −3 and −2 positions of the PAM, in contrast with MAD7, which does not have strong activity with cytosine at the −2 position of the PAM. Such differences may confer advantages for genome engineering applications.

Table 5 provides a look-up key to link enzyme ID, amino acid sequence, E. coli optimized nucleotide sequence, human optimized nucleotide sequence, protospacer adjacent motif (PAM), and cluster.

TABLE 5
Enzyme ID, Sequence, and Cluster

| | | E. coli | | | |
|---|---|---|---|---|---|
| | | optimized | Human optimized | | |
| Enzyme | Amino acid | nucleotide | nucleotide | | |
| ID | sequence | sequence | sequence | PAM | Cluster |
| GIG-1 | SEQ ID NO: 123 | SEQ ID NO: 632 | SEQ ID NO: 722 | TTTV | 1 |
| GIG-2 | SEQ ID NO: 43 | SEQ ID NO: 633 | SEQ ID NO: 723 | NTTN, | 11 |
| | | | | NCTV | |
| GIG-3 | SEQ ID NO: 79 | SEQ ID NO: 634 | SEQ ID NO: 724 | TTTV | 1 |
| | | | | (strongest), | |
| | | | | CTTV, | |
| | | | | GTTV | |
| GIG-4 | SEQ ID NO: 254 | SEQ ID NO: 635 | SEQ ID NO: 725 | TTTV | 1 |
| GIG-5 | SEQ ID NO: 28 | SEQ ID NO: 636 | SEQ ID NO: 726 | NTTN, | 11 |
| | | | | NCTV | |
| | | | | (weak) | |
| GIG-6 | SEQ ID NO: 98 | SEQ ID NO: 637 | SEQ ID NO: 727 | TTTV | 9 |
| GIG-7 | SEQ ID NO: 272 | SEQ ID NO: 638 | SEQ ID NO: 728 | Not found | 3 |
| GIG-8 | SEQ ID NO: 166 | SEQ ID NO: 639 | SEQ ID NO: 729 | Not found | 1 |
| GIG-9 | SEQ ID NO: 202 | SEQ ID NO: 640 | SEQ ID NO: 730 | Not found | 1 |
| GIG-10 | SEQ ID NO: 146 | SEQ ID NO: 641 | SEQ ID NO: 731 | TTTV | 1 |
| | | | | (strongest), | |
| | | | | NTTV, | |
| | | | | TCTV | |
| | | | | (weak) | |
| GIG-11 | SEQ ID NO: 175 | SEQ ID NO: 642 | SEQ ID NO: 732 | TTTV | 1 |
| | | | | (strongest), | |
| | | | | CTTV | |
| | | | | (weak) | |
| GIG-12 | SEQ ID NO: 197 | SEQ ID NO: 643 | SEQ ID NO: 733 | TTTV | 1 |
| | | | | (strongest), | |
| | | | | CTTV | |
| | | | | (weak) | |
| GIG-13 | SEQ ID NO: 214 | SEQ ID NO: 644 | SEQ ID NO: 734 | TTTV | 1 |
| GIG-14 | SEQ ID NO: 21 | SEQ ID NO: 645 | SEQ ID NO: 735 | Not found | 11 |
| GIG-15 | SEQ ID NO: 151 | SEQ ID NO: 646 | SEQ ID NO: 736 | TTTV | 9 |
| GIG-16 | SEQ ID NO: 142 | SEQ ID NO: 647 | SEQ ID NO: 737 | TTTV | 10 |
| GIG-17 | SEQ ID NO: 116 | SEQ ID NO: 648 | SEQ ID NO: 738 | TTTV | 11 |
| | | | | (strongest), | |
| | | | | NTTV, | |
| | | | | TCTV | |
| | | | | (weak) | |
| GIG-18 | SEQ ID NO: 103 | SEQ ID NO: 649 | SEQ ID NO: 739 | Not found | 5 |
| GIG-19 | SEQ ID NO: 55 | SEQ ID NO: 650 | SEQ ID NO: 740 | Not found | 5 |
| GIG-20 | SEQ ID NO: 172 | SEQ ID NO: 651 | SEQ ID NO: 741 | NTTV, | 1 |
| | | | | TCTV | |
| | | | | (weak) | |
| GIG-23 | SEQ ID NO: 210 | SEQ ID NO: 654 | SEQ ID NO: 744 | NTTV, | 9 |
| | | | | TCTV | |
| | | | | (weak) | |
| GIG-24 | SEQ ID NO: 232 | SEQ ID NO: 655 | SEQ ID NO: 745 | TTTV | 9 |
| | | | | (strongest), | |
| | | | | GTTV | |
| GIG-25 | SEQ ID NO: 83 | SEQ ID NO: 656 | SEQ ID NO: 746 | TTTV | 1 |
| | | | | (strongest), | |
| | | | | CTTV, | |
| | | | | GTTV | |
| GIG-26 | SEQ ID NO: 259 | SEQ ID NO: 657 | SEQ ID NO: 747 | TTTV | 9 |
| GIG-27 | SEQ ID NO: 179 | SEQ ID NO: 658 | SEQ ID NO: 748 | NTTV, | 10 |
| | | | | TCTV | |
| | | | | (weak) | |
| GIG-28 | SEQ ID NO: 188 | SEQ ID NO: 659 | SEQ ID NO: 749 | Not found | 1 |
| GIG-29 | SEQ ID NO: 252 | SEQ ID NO: 660 | SEQ ID NO: 750 | TTTV | 9 |
| GIG-30 | SEQ ID NO: 242 | SEQ ID NO: 661 | SEQ ID NO: 751 | NTTV | 1 |
| GIG-31 | SEQ ID NO: 77 | SEQ ID NO: 662 | SEQ ID NO: 752 | NTTV, | 10 |
| | | | | TCTV | |
| | | | | (weak) | |
| GIG-32 | SEQ ID NO: 217 | SEQ ID NO: 663 | SEQ ID NO: 753 | TTTV | 1 |
| GIG-33 | SEQ ID NO: 239 | SEQ ID NO: 664 | SEQ ID NO: 754 | TTTV | 9 |
| GIG-34 | SEQ ID NO: 106 | SEQ ID NO: 665 | SEQ ID NO: 755 | Not found | 5 |
| GIG-35 | SEQ ID NO: 191 | SEQ ID NO: 666 | SEQ ID NO: 756 | TTTV | 1 |
| | | | | (strongest), | |
| | | | | CTTV, | |
| | | | | GTTV | |
| GIG-36 | SEQ ID NO: 11 | SEQ ID NO: 667 | SEQ ID NO: 757 | NTTV, | 11 |
| | | | | TCTV | |
| | | | | (weak) | |
| GIG-37 | SEQ ID NO: 62 | SEQ ID NO: 668 | SEQ ID NO: 758 | NTTV, | 11 |
| | | | | TCTV | |
| | | | | (weak) | |
| GIG-38 | SEQ ID NO: 67 | SEQ ID NO: 669 | SEQ ID NO: 759 | Not found | 5 |
| GIG-39 | SEQ ID NO: 129 | SEQ ID NO: 670 | SEQ ID NO: 760 | Not found | 11 |
| GIG-40 | SEQ ID NO: 10 | SEQ ID NO: 671 | SEQ ID NO: 761 | TTTV | 1 |
| | | | | (strongest), | |
| | | | | CTTV, | |
| | | | | GTTV | |
| GIG-41 | SEQ ID NO: 131 | SEQ ID NO: 672 | SEQ ID NO: 762 | Not found | 1 |
| GIG-42 | SEQ ID NO: 84 | SEQ ID NO: 673 | SEQ ID NO: 763 | Not found | 11 |
| GIG-43 | SEQ ID NO: 158 | SEQ ID NO: 674 | SEQ ID NO: 764 | TTTV | 10 |
| GIG-44 | SEQ ID NO: 200 | SEQ ID NO: 675 | SEQ ID NO: 765 | NTTV, | 1 |
| | | | | TCTV | |
| | | | | (weak) | |
| GIG-45 | SEQ ID NO: 82 | SEQ ID NO: 676 | SEQ ID NO: 766 | NTTV | 11 |

### Expression and Purification of Nuclease Proteins

[0210] The nucleases of the present invention are purified using methods well known by those skilled in the art. Coding sequences of the nucleases were codon-optimized for E. coli (e.g., SEQ ID Nos: 632-676 and 677-721) and cloned in to a pET21b expression vector (e.g., FIG. 8 and SEQ ID NO: 812 for pET21b-GIG-17) in frame with a 6×his tag. Other types of purification tags can be also used, e.g., FLAG tag, etc. The plasmid was transformed into Rosetta2(DE3) E. coli, which were cultured to an OD of 0.5, placed on ice for 15 minutes, then induced with 1 mM IPTG and shaken overnight at 20 C for expression. Cells were harvested and lysed by chemical and/or physical methods. His-tagged protein was captured from the lysate using free IMAC resin (Ni-NTA), or resin packed in a column, with imidazole for elution. Further purification was performed using CEX column chromatography at pH 5.5-7.5 and high salt elution. Final polishing was performed using size exclusion chromatography. Purified nucleases are formulated in 20 mM HEPES, 500 mM NaCl pH 7.5, and stored at 4 C or −80 C.

[0211] Purified protein was assessed for purity using SDS-PAGE (FIG. 9) and SE-HPLC (FIGS. 10A-C), with concentration by A280. Results are summarized in Table 6.

TABLE 6
Purification results for GIG- nucleases of the present invention
using Ni-NTA (His-tag capture) and CEX purification methods.

| | After Ni-NTA | | | After CEX | | | |
|---|---|---|---|---|---|---|---|
| | micrograms | Gel purity | SEC purity | micrograms | Gel purity | SEC purity | Mg/mL |
| AsCas12a | 788 | 67% | 38% | 157 | 90% | 84% | 5.22 |
| MAD7 | 723 | 84% | 83% | 257 | 99% | 91% | 10.29 |
| GIG-1 | 3087 | 96% | 90% | 1179 | 96% | 91% | 23.58 |
| GIG-2 | 3089 | 76% | 86% | 1514 | 81% | 75% | 30.27 |
| GIG-5 | 1888 | 100% | 86% | 838 | 100% | 87% | 20.95 |
| GIG-10 | 1967 | 79% | 88% | 779 | 68% | 88% | 12.98 |
| GIG-12 | 444 | 64% | 25% | 78 | 87% | 52% | 1.96 |
| GIG-15 | 1357 | 63% | 77% | 467 | 64% | 82% | 10.38 |
| GIG-16 | 2709 | 93% | 86% | 1537 | 92% | 81% | 23.64 |
| GIG-17 | 401 | 50% | 57% | 78 | 73% | 88% | 3.1 |

### Genome Editing Activity Assay for GIG-Nucleases

[0212] SpCas9 (Synthego Corporation, Redwood City, CA, USA), Alt-R AsCas12a (Cpf1) V3 (IDT, Coralville, IA, USA), purified MAD7 and purified GIG-nucleases were electroporated into Jurkat E6-1 cells (TIB-152, ATCC, Manassas, VA, USA) using the Amaxa Nucleofector system (Lonza, Basel, Switzerland). Ribonucleoprotein (RNP) complexes were prepared by incubating SpCas9, AsCas12a, or GIG-nucleases with synthetic guide RNA (sgRNA) at a 1:1.2 molar ratio for 10 minutes at room temperature. SgRNA sequences used with asCas12a and GIG-nucleases were synthesized by IDT (Coralville, IA, USA) and (are provided in Table 7. The sgRNA sequence used with spCas9 was synthesized by Synthego Corporation (Redwood City, CA, USA) and consists of a TRAC-targeting protospacer (Table 7) and a proprietary scaffold from Synthego. Cells were pelleted and resuspended in Nucleofection Buffer SE (Lonza, Basel, Switzerland) at 1×10⁷ cells/mL. Alt-R® Cpf1 Electroporation Enhancer (IDT, Coralville, IA, USA) was added to the cells, then 20 μL of the cell suspension was mixed with 40 pmol RNP complex immediately before electroporation. Cells were then transferred to a 96-well plate, resuspended in 200 μL RPMI medium supplemented with 10% FBS. After recovering for 24 hours, the cells were transferred to 6-well plates containing 2 mL RPMI medium supplemented with 10% FBS. Cells were analyzed for knockdown efficiency by flow cytometry 5 days after electroporation.

[0213] Electroporated Jurkat E6-1 cells were washed with MACS buffer, then stained with APC anti-human CD3 antibody (Clone UCHT1, BioLegend, San Diego, CA, USA) and PerCP/Cyanine5.5 anti-human TCR u/P Antibody (Clone IP26, BioLegend, San Diego, CA, USA) for 30 minutes at 4° C. After washing twice with MACS buffer, cells were stained with DAPI and analyzed using a CytoFLEX flow cytometer (Beckman Coulter, Brea, CA, USA) and FlowJo software (BD Biosciences, San Jose, CA, USA). Cytometry data for 50,000 live (DAPI-) cells was collected for each sample. TCR knockdown efficiency was determined by assessing the percentage of TCRαβ+/CD3+ cells in electroporated samples normalized to wild-type cells. The results of these experiments are shown in Tables 8-9 and FIGS. 11-12.

TABLE 7
TRAC target genome and sgRNA sequences.

| | sgRNA Target | |
|---|---|---|
| sgRNA | (Gene: (PAM) | |
| Name | gRNA Sequence) | sgRNA Sequence |
| GR-31 | TRAC: | Protospacer: |
| | AGAGTCTCTCAGCT | rArGrA rGrUrC rUrCrU rCrArG |
| | GGTACA(CGG) | rCrUrG rGrUrA rCrA |
| GR-40 | Scrambled/non- | rUrA rArUrU rUrCrU rArCrU |
| | targeting: | rCrUrU rGrUrA rGrArU rCrGrU |
| | CGTTAATCGCGTAT | rUrArA rUrCrG rCrGrU rArUrA |
| | AATACGG | rArUrA rCrGrG |
| GR-42 | TRAC: | rUrA rArUrU rUrCrU rArCrU |
| | (TTTA)GAGTCTCT | rCrUrU rGrUrA rGrArU rGrArG |
| | CAGCTGGTACACGG | rUrCrU rCrUrC rArGrC rUrGrG |
| | C | rUrArC rArCrG rGrC |

TABLE 8
Knockdown and HDR Efficiency of selected GIG nucleases
at the human TRAC locus in Jurkat cells.

| | | TCR Knockdown | HDR Efficiency |
|---|---|---|---|
| Nuclease | sgRNA Target | Efficiency | (GFP + cells) |
| asCas12a | Scrambled (GR-40) | 0.0% | 0.31% |
| asCas12a | TRAC (GR-42) | 97.1% | 4.18% |
| MAD7 | TRAC (GR-42) | 92.2% | 4.17% |
| GIG-1 | TRAC (GR-42) | 81.9% | 2.94% |
| GIG-2 | TRAC (GR-42) | 15.5% | 1.05% |
| GIG-4 | TRAC (GR-42) | 8.1% | 0.35% |
| GIG-5 | TRAC (GR-42) | 2.1% | 0.33% |
| GIG-6 | TRAC (GR-42) | 0.8% | 0.18% |
| GIG-10 | TRAC (GR-42) | 23.9% | 1.16% |
| GIG-11 | TRAC (GR-42) | 4.5% | 0.28% |
| GIG-15 | TRAC (GR-42) | 3.4% | 0.20% |
| GIG-16 | TRAC (GR-42) | 1.1% | 0.22% |
| GIG-17 | TRAC (GR-42) | 97.4% | 4.27% |

TABLE 9
Knockdown and HDR Efficiency of selected GIG nucleases at
the human TRAC locus in Jurkat cells.

| | | TCR Knockdown | | HDR Efficiency | |
|---|---|---|---|---|---|
| | | Efficiency | | (GFP + cells) | |
| | | No | GFP | No | GFP |
| Nuclease | sgRNA Target | Template | Template | Template | Template |
| spCas9 | TRAC (GR-31) | 97.9% | 97.2% | 0.059% | 0.84% |
| asCas12a | TRAC (GR-42) | 86.6% | 96.0% | 0.021% | 2.13% |
| GIG-17 | TRAC (GR-42) | 97.0% | 97.8% | 0.013% | 1.98% |
| GIG-2 | TRAC (GR-42) | 11.1% | 12.9% | 0.011% | 0.43% |

[0214] The results show that some nucleases in cluster 1 or 11 (e.g., GIG-1, GIG-17, GIG-10, GIG-2) have particularly strong nuclease activity compared to other nucleases in other clusters, as summarized in Table 10.

TABLE 10
GIG nucleases in the order of HDR Efficiency

| | | HDR | | | |
|---|---|---|---|---|---|
| | | Efficiency | | | TCR Knockdown |
| Nuclease | Cluster | (GFP + cells) | Nuclease | Cluster | Efficiency |
| GIG-17 | 11 | 4.27% | GIG-17 | 11 | 97.40% |
| (SEQ ID NO: 116) | | | (SEQ ID NO: 116) | | |
| GIG-1 | 1 | 2.94% | GIG-1 | 1 | 81.90% |
| (SEQ ID NO: 123) | | | (SEQ ID NO: 123) | | |
| GIG-10 | 1 | 1.16% | GIG-10 | 1 | 23.90% |
| (SEQ ID NO: 146) | | | (SEQ ID NO: 146) | | |
| GIG-2 | 11 | 1.05% | GIG-2 | 11 | 15.50% |
| (SEQ ID NO: 43) | | | (SEQ ID NO: 43) | | |
| GIG-4 | 1 | 0.35% | GIG-4 | 1 | 8.10% |
| (SEQ ID NO: 254) | | | (SEQ ID NO: 254) | | |
| GIG-5 | 11 | 0.33% | GIG-11 | 1 | 4.50% |
| (SEQ ID NO: 28) | | | (SEQ ID NO: 175) | | |
| GIG-11 | 1 | 0.28% | GIG-15 | 9 | 3.40% |
| (SEQ ID NO: 175) | | | (SEQ ID NO: 151) | | |
| GIG-16 | 10 | 0.22% | GIG-5 | 11 | 2.10% |
| (SEQ ID NO: 142) | | | (SEQ ID NO: 28) | | |
| GIG-15 | 9 | 0.20% | GIG-16 | 10 | 1.10% |
| (SEQ ID NO: 151) | | | (SEQ ID NO: 142) | | |
| GIG-6 | 9 | 0.18% | GIG-6 | 9 | 0.80% |
| (SEQ ID NO: 98) | | | (SEQ ID NO: 98) | | |

[0215] Genome editing activity of purified GIG-17 was further analyzed and compared to that of Alt-R AsCas12a (Cpf1) V3 (IDT, Coralville, IA, USA). RNPs were generated as described above with sgRNAs (Table 11) designed to generate loss-of-function mutations within the B2M and HLA-A*02:01 genes in Jurkat E6-1 and T2 cell lines, respectively. Jurkat E6-1 cells were resuspended in Nucleofection Buffer SE and T2 cells were resuspended in Nucleofection Buffer SF (Lonza, Basel, Switzerland) at 1×10⁷ cells/mL. 20 μL of the cell suspension was mixed with 40 pmol RNP complex immediately before electroporation. Cells were then transferred to a 96-well plate, resuspended in 200 μL of appropriate medium (RPMI medium supplemented with 10% FBS for Jurkat E6-1 cells and IMDM medium supplemented with 20% FBS for T2 cells). After recovering, the cells were transferred to 6-well plates containing 2 mL of appropriate medium. Cells were analyzed for knockdown efficiency by flow cytometry 5 days after electroporation as described above. Jurkat E6-1 cells were stained with PE anti-human HLA-A,B,C antibody (clone W6/32, BioLegend), and T2 cells were stained with PE anti-human HLA-A2 antibody (clone BB7.2, BioLegend). Knockdown efficiency was determined by assessing the percentage of HLA-deficient cells in the electroporated samples. The results of these experiments are shown in Tables 12-13 and FIGS. 13-14.

[0216] An example GIG-nuclease mammalian expression vector is shown in FIG. 15 and SEQ ID 813. Example GIG-nucleases codon optimized for mammalian expression are listed in SEQ ID 722-811.

TABLE 11
B2M and HLA-A*02:01
target genome and sgRNA sequences.

| | sgRNA Target | |
|---|---|---|
| sgRNA | (Gene: (PAM) | |
| Name | gRNA Sequence) | sgRNA Sequence |
| GR-44 | B2M: | rUrA rArUrU rUrCrU rArCrU |
| | (TTTC)ATCCATCC | rCrUrU rGrUrA rGrArU rArUrC |
| | GACATTGAAGTTGA | rCrArU rCrCrG rArCrA rUrUrG |
| | C | rArArG rUrUrG rArC |
| GR-45 | B2M: | rUrA rArUrU rUrCrU rArCrU |
| | (TTTC)CCGATATT | rCrUrU rGrUrA rGrArU rCrCrG |
| | CCTCAGGTACTCCA | rArUrA rUrUrC rCrUrC rArGrG |
| | A | rUrArC rUrCrC rArA |
| GR-46 | B2M: | rUrA rArUrU rUrCrU rArCrU |
| | (TTTA)CTCACGTC | rCrUrU rGrUrA rGrArU rCrUrC |
| | ATCCAGCAGAGAAT | rArCrG rUrCrA rUrCrC rArGrC |
| | G | rArGrA rGrArA rUrG |
| GR-71 | HLA-A*02:01: | rUrA rArUrU rUrCrU rArCrU |
| | (TTTC)CCTCCCGA | rCrUrU rGrUrA rGrArU rCrCrU |
| | CCCCGCACTCACCC | rCrCrC rGrArC rCrCrC rGrCrA |
| | GC | rCrUrC rArCrC rCrGrC |
| GR-72 | HLA-A*02:01: | rUrA rArUrU rUrCrU rArCrU |
| | (TTTC)TTCACATC | rCrUrU rGrUrA rGrArU rUrUrC |
| | CGTGTCCCGGCCCG | rArCrA rUrCrC rGrUrG rUrCrC |
| | GC | rCrGrG rCrCrC rGrGrC |
| GR-73 | HLA-A*02:01: | rUrA rArUrU rUrCrU rArCrU |
| | (TTTC)CCAGAGCC | rCrUrU rGrUrA rGrArU rCrCrA |
| | GTCTTCCCAGCCCA | rGrArG rCrCrG rUrCrU rUrCrC |
| | CC | rCrArG rCrCrC rArCrC |

TABLE 12
Knockdown efficiency of AsCas12a and GIG17
nucleases at the human B2M locus in Jurkat cells.

| | Knockdown efficiency (% HLA-A,B,C⁻ cells) | |
|---|---|---|
| sgRNA | AsCas12a | Gig17 |
| GR-44 | 0.43% | 1.63% |
| GR-45 | 10.90% | 1.88% |
| GR-46 | 0.61% | 4.97% |

TABLE 13
Knockdown efficiency of AsCas12a and GIG17 nucleases
at the human HLA-A*02:01 locus in T2 cells.

| | Knockdown efficiency (% HLA-A2⁻ cells) | |
|---|---|---|
| sgRNA | AsCas12a | Gig17 |
| GR-71 | 10.40% | 1.45% |
| GR-72 | 0.21% | 0.17% |
| GR-73 | 4.42% | 14.30% |

### 7. INCORPORATION BY REFERENCE

[0217] All publications, patents, patent applications and other documents cited in this application are hereby incorporated by reference in their entireties for all purposes to the same extent as if each individual publication, patent, patent application or other document were individually indicated to be incorporated by reference for all purposes.

### 8. EQUIVALENTS

[0218] While various specific embodiments have been illustrated and described, the above specification is not restrictive. It will be appreciated that various changes can be made without departing from the spirit and scope of the invention(s). Many variations will become apparent to those skilled in the art upon review of this specification.

### 9. SEQUENCES

TABLE 14
Sequences included in the Sequence Listing

| Sequence | Description |
|---|---|
| 1 | MAD7 nuclease sequence |
| 2-273 | MAD7 homolog sequences (predicted novel |
| | CRISPR nucleases) |
| 274-627 | Predicted CRISPR array repeat sequences |
| 628-631 | Nuclear localization sequences (NLSs) |
| 632-676 | E. coli codon optimized nucleotide sequence |
| 677-721 | E. coli codon optimized nucleotide sequence |
| | with 2x NLS (Nucloeplasmin & c-Myc), |
| | 6x His-tag, and stop codon |
| 722-766 | Human codon optimized nucleotide sequence |
| 767-811 | Human codon optimized nucleotide sequence |
| | with 2x NLS (Nucloeplasmin & c-Myc), |
| | x His-tag, and stop codon |
| 812 | pET21b-GIG17 Plasmid |
| 813 | pReceiver-EF1a-GIG17 Plasmid |
| 814 | T7p14-GIG17 Plasmid |
| 815-822 | Conserved sequences of cluster 1 |
| 823-832 | Conserved sequences of cluster 4 |
| 833 | Conserved sequence of cluster 6 |
| 834 | Conserved sequence of cluster 7 |
| 835-840 | Conserved sequences of cluster 9 |
| 841-844 | Conserved sequences of cluster 10 |

What is claimed is:

1. An engineered, non-naturally occurring targetable nuclease system comprising: (a) a nucleic acid-guided nuclease, comprising a nuclease polypeptide having at least 95% sequence identity to a sequence selected from SEQ ID NO: 2-273, and (b) at least one engineered guide polynucleotide designed to form a complex with the nuclease and comprising a guide sequence, wherein the guide sequence is designed to hybridize with a target sequence in a eukaryotic cell, and (c) the complex of the nuclease and the guide polynucleotide do not naturally occur.

2. The targetable nuclease system of claim 1, wherein the nuclease polypeptide has at least 97% sequence identity to a sequence selected from SEQ ID NO: 2-273.

3. The targetable nuclease system of claim 2, wherein the nuclease polypeptide has less than 100% sequence identity to SEQ ID NO: 2-273.

4. The targetable nuclease system of claim 1, wherein the nuclease polypeptide has at least 95% sequence identity to a sequence selected from SEQ ID NO: 123, 116, 146, 43, 254, and 175.

5. The targetable nuclease system of claim 1, wherein the nuclease polypeptide has at least 95% sequence identity to a sequence selected from SEQ ID NO: 123, 146, 254, and 175.

6. The targetable nuclease system of claim 5, wherein the nuclease polypeptide comprises a sequence selected from SEQ ID NO: 815-822

7. The targetable nuclease system of claim 6, wherein the nuclease polypeptide comprises sequences of SEQ ID NO: 815-822

8. The targetable nuclease system of claim 1, wherein the nuclease polypeptide has at least 95% sequence identity to a sequence selected from SEQ ID NO: 116 and 43.

9. The targetable nuclease system of claim 1, wherein the nuclease polypeptide comprises a sequence of SEQ ID NO: 123.

10. The targetable nuclease system of claim 1, wherein the nuclease polypeptide comprises a sequence of SEQ ID NO: 116.

11. The targetable nuclease system of claim 1, wherein the nuclease polypeptide comprises a sequence of SEQ ID NO: 146.

12. The targetable nuclease system of claim 1, wherein the nuclease polypeptide comprises a sequence of SEQ ID NO: 32.

13. The targetable nuclease system of claim 1, wherein the nuclease polypeptide comprises a sequence of SEQ ID NO: 254.

14. The targetable nuclease system of claim 1, wherein the nuclease polypeptide comprises a sequence of SEQ ID NO: 175.

15. The targetable nuclease system of claim 1, wherein the nuclease polypeptide is fused to a fusion peptide.

16. The targetable nuclease system of claim 15, wherein the fusion peptide is a signal peptide fused in-frame to the nuclease polypeptide.

17. The targetable nuclease system of claim 15, wherein the fusion peptide is a nuclear localization sequence fused to the nuclease polypeptide.

18. The targetable nuclease system of claim 17, wherein the nuclear localization sequence has a sequence selected from SEQ ID NO: 628-631.

19. The targetable nuclease system of claim 1, wherein the nuclease polypeptide is originated from Acidaminococcus massiliensis, Acidaminococcus sp., Acinetobacter indicus, Agathobacter rectalis, Anaerovibrio lipolyticus, Bacteroidales bacterium, Bacteroides galacturonicus, Bacteroides plebeius, Bacteroidetes bacterium, Butyrivibrio fibrisolvens, Butyrivibrio hungatei, Butyrivibrio sp., Candidatus Falkowbacteria bacterium, Candidatus Falkowbacteria bacterium, Candidatus Gottesmanbacteria bacterium, Candidatus Jacksonbacteria bacterium, Candidatus Magasanikbacteria bacterium, Candidatus Moranbacteria bacterium, Candidatus Pacebacteria bacterium, Candidatus Roizmanbacteria bacterium, Candidatus Ryanbacteria bacterium, Candidatus Saccharibacteria bacterium, Candidatus Sungbacteria bacterium, Candidatus Uhrbacteria bacterium, Candidatus Wildermuthbacteria bacterium, Candidatus Yonathbacteria bacterium, Catenovulum sp., Clostridiales bacterium, Clostridium sp., Coprococcus eutactus, Coprococcus sp., Deltaproteobacteria bacterium, Elizabethkingia sp., Eubacteriaceae bacterium, Eubacterium eligens, Eubacterium rectale, Eubacterium sp., Eubacterium ventriosum, Fibrobacter sp., Fibrobacter succinogenes, Firmicutes bacterium, Flavobacterium branchiophilum, Francisella hispaniensis, Francisella novicida, Francisella philomiragia, Francisella tularensis, Lachnospiraceae bacterium, Lachnospira pectinoschiza, Lentisphaeria bacterium, Leptospiraceae bacterium, Leptospira sp., Moraxella bovis, Moraxella bovoculi, Moraxella lacunata, Moraxella ovis, Moraxella sp., Muribaculaceae bacterium, Patescibacteria group bacterium, Phycisphaerae bacterium, Phycisphaerales bacterium, Porphyromonadaceae bacterium, Porphyromonas crevioricanis, Prevotella brevis, Prevotellaceae bacterium, Prevotella copri, Prevotellamassilia sp., Prevotella ruminicola, Prevotella sp., Prolixibacteraceae bacterium, Pseudobutyrivibrio sp., Pseudobutyrivibrio xylanivorans, Psychrobacter sp., Ruminococcaceae bacterium, Ruminococcus sp., Sedimentisphaera cyanobacteriorum, Sneathia amnii, Spirochaetia bacterium, Succinivibrionaceae bacterium, or Treponema sp.

20. A polynucleotide comprising a first polynucleotide segment encoding the nucleic acid-guided nuclease having at least 95% sequence identity to a sequence selected from SEQ ID NO: 2-273.

21. The polynucleotide of claim 20, further comprising a second polynucleotide segment encoding a fusion peptide.

22. A vector encoding the nucleic acid-guided nuclease, comprising the polynucleotide of claim 20.

23. A host cell comprising the polynucleotide of claim 20.

24. A method of generating a nucleic acid-guided nuclease comprising the steps of:
culturing the host cell of claim 23, and
isolating the nucleic acid-guided nuclease from the host cell culture.

25. A method of modifying a target region of a eukaryotic or prokaryotic genome, comprising the steps of:
a. contacting a sample comprising the target region with
i. a nucleic acid-guided nuclease having at least 90% sequence identity to a sequence selected from the group consisting of SEQ ID NO: 2-273, and
ii. a guide nucleic acid complexed with the nucleic acid-guided nuclease, and
b. allowing the nucleic acid-guided nuclease to modify the target region.

The application's sequence listing, which the Patent Office published only in electronic form, follows.

SEQUENCE LISTING (888 sequences)

SEQ ID NO: 1 - protein, 1263 aa, Eubacterium rectale
MNNGTNNFQNFIGISSLQKTLRNALIPTETTQQFIVKNGIIKEDELRGENRQILKDIMDDYYRGFISETLSSIDDIDWTSLFEKMEIQLKNGDNKDTLIKEQTEYRKAIHKKFANDDRFKNMFSAKLISDILPEFVIHNNNYSASEKEEKTQVIKLFSRFATSFKDYFKNRANCFSADDISSSSCHRIVNDNAEIFFSNALVYRRIVKSLSNDDINKISGDMKDSLKEMSLEEIYSYEKYGEFITQEGISFYNDICGKVNSFMNLYCQKNKENKNLYKLQKLHKQILCIADTSYEVPYKFESDEEVYQSVNGFLDNISSKHIVERLRKIGDNYNGYNLDKIYIVSKFYESVSQKTYRDWETINTALEIHYNNILPGNGKSKADKVKKAVKNDLQKSITEINELVSNYKLCSDDNIKAETYIHEISHILNNFEAQELKYNPEIHLVESELKASELKNVLDVIMNAFHWCSVFMTEELVDKDNNFYAELEEIYDEIYPVISLYNLVRNYVTQKPYSTKKIKLNFGIPTLADGWSKSKEYSNNAIILMRDNLYYLGIFNAKNKPDKKIIEGNTSENKGDYKKMIYNLLPGPNKMIPKVFLSSKTGVETYKPSAYILEGYKQNKHIKSSKDFDITFCHDLIDYFKNCIAIHPEWKNFGFDFSDTSTYEDISGFYREVELQGYKIDWTYISEKDIDLLQEKGQLYLFQIYNKDFSKKSTGNDNLHTMYLKNLFSEENLKDIVLKLNGEAEIFFRKSSIKNPIIHKKGSILVNRTYEAEEKDQFGNIQIVRKNIPENIYQELYKYFNDKSDKELSDEAAKLKNVVGHHEAATNIVKDYRYTYDKYFLHMPITINFKANKTGFINDRILQYIAKEKDLHVIGIDRGERNLIYVSVIDTCGNIVEQKSFNIVNGYDYQIKLKQQEGARQIARKEWKEIGKIKEIKEGYLSLVIHEISKMVIKYNAIIAMEDLSYGFKKGRFKVERQVYQKFETMLINKLNYLVFKDISITENGGLLKGYQLTYIPDKLKNVGHQCGCIFYVPAAYTSKIDPTTGFVNIFKFKDLTVDAKREFIKKFDSIRYDSEKNLFCFTFDYNNFITQNTVMSKSSWSVYTYGVRIKRRFVNGRFSNESDTIDITKDMEKTLEMTDINWRDGHDLRQDIIDYEIVQHIFEIFRLTVQMRNSLSELEDRDYDRLISPVLNENNIFYDSAKAGDALPKDADANGAYCIALKGLYEIKQITENWKEDGKFSRDKLKISNKDWFDFIQNKRYL

SEQ ID NO: 2 - protein, 1251 aa, Moraxella bovoculi
MLFQDFTHLYPLSKTVRFELKPIGRTLEHIHAKNFLSQDETMADMYQKVKVILDDYHRDFIADMMGEVKLTKLAEFYDVYLKFRKNPKDDELQKQLKDLQAVLRKESVKPIGNGGKYKAGHDRLFGAKLFKDGKELGDLAKFVIAQEGKSSPKLAHLAHFEKFSTYFTGFHDNRKNMYSDEDKHTAIAYRLIHENLPRFIDNLQILTTIKQKHSALYDQIINELTASGLDVSLASHLDGYHKLLTQEGITAYNRIIGEVNGYTNKHNQICHKSERIAKLRPLHKQILSDGMGVSFLPSKFADDSEMCQAVNEFYRHYADVFAKVQSLFDGFDDHQKDGIYVEHKNLNELSKQAFGDFALLGRVLDGYYVDVVNPEFNERFAKAKTDNAKAKLTKEKDKFIKGVHSLASLEQAIKHHTARHDDESVQAGKLGQYFKHGLAGVDNPIQKIHNNHSTIKGFLERERPAGERALPKIKSGKNPEMTQLRQLKELLDNALNVAHFAKLLMTKTTLDNQDGNFYGEFGVLYDELAKIPTLYNKVRDYLSQKPFSTEKYKLNFGNPTLLNGWDLNKEKDNFGVILQKDGCYYLALLDKAHKKVFDNAPNTGKNVYQKMIYKLLPGPNKMLPRVFFAKSNLDYYNPSAELLDKYAQGTHKKGDNFNLKDCHALIDFFKAGINKHPEWQNFGFKFSPTSSYRDLSDFYREVEPQGYQVKFVDINADYIDELVEQGQLYLFQIYNKDFSPKAHGKPNLHTLYFRALFSEDNLANPIYKLNGEAQIFYRKASLGMNETTIHRAGEILENKNPDNPKERVFTYDIIKDRRYTQDKFMLHVPITMNFGVQGMTIKEFNKKVNQSIRQYDDVNVIGIDRGERHLLYLTVINSKGEILEQRSLNDITTASANGTQMTTPYHKILDKREIERLNARVGWGEIETIKELKSGYLSHVVHQVSQLMLKYNAIVVLEDLNFGFKRGRFKVEKQIYQNFENALIKKLNHLELKDKADDEIGSYKNALQLTNNFTDLKNIGKQTGFLFYVPAWNTSKIDPETGFVDLLKPRYENIAQSQAFFGKFDKICYNADKDYFEFHIDYAKFTDKAKNSRQTWTICSHGDKRYVYDKTANQNKGATKGINVNDELKSLFARYHINEKQPNLVMDICQNNDKEFHKSLMYLLKTLLALRYSNASSDEDFILSPVANDEGVFFNSALADDTQPQNADANGAYHIALKGLWLLNELKNSDDLNKVKLAIDNQTWLNFAQNR

SEQ ID NO: 3 - protein, 1304 aa, Acidaminococcus sp.
NCMAAFDKFIHQYQVSKTLRFALIPQGKTLENTKNNVLQEDDERQKNYEKVKPILDRIYKVFAEESLKDCSVDWNDLNACLDAYQKNPSADKRQKVKAAQDALRDEIAGYFTGKQYANGKNKNAVKEKEQAELYKDIFSKKIFDGTVTNNKLPQVNLSAEETELLGCFDKFTTYFVGFYQNRENVFSGEDIATAIPHRIVQDNFPKFRENCRIYQDLIKNEPALKPLLQQAAAAVMAQNPKGIYQPRKSLDDIFVIPFYNHLLLQDDIDYFNQILGGISGAAGQKKIQGLNETINLFMQQHPQEADKLKKKKIRHRFIPLYKQILSDRTSFSFIPEAFSNSQEALDGIETFKKSLKKNDTFGALERLIQNLASLDLKYVYLSNKKVNEISQALYGEWHCIQDVLKQDFSLESLIQINPQNSSNGFLATLTDEGKKRISQCRNVLGNPLPVKLADDQDKAQVKNQLDTLLAAVHYLEWFKADPDLETDPNFTVPFEKIWEELVPLLSLYSKVRNFVTKKPYSTAKFKLNFANPTLADGWDIHKESDNGALLFEKGGLYYLGIMNPKDKPNFKSYQGAEPYYQKMVYRFFPDCSKTIPKCSTQRKDVKKYFEDHPQATSYQIHDSKKEKFRQDFFEIPREIYELNNTTYGTGKSKYKKFQTQYYQKTQDKSGYQKALRKWIDFSKKFLQTYVSTSIFDFKGLRPSKDYQDLGEFYKDVNSRCYRVTFEKIRVQDIHEAVKNGQLYLFQLYNKDFSPKSHGLPNLHTLYWKAVFDPENLKDPIVKLNGQAELFYRPKSNMQIIQHKTGEEIVNKKLKDGTPVPDDIYREISAYVQGKCQGNLSPEAEKWLPSVTIKKAAHDITKDRRFTEDKFFFHVPITLNYQSSGKPTAFNSQVNDFLTEHPETNIIGIDRGERNLIYAVVITPDGKILEQKSFNVIHDFDYHESLSQREKQRVAARQAWTAIGRIKDLKEGYLSLVVHEIAQMMIKYQAVVVLENLNTGFKRVRGGISEKAVYQQFEKMLIEKLNFLVFKDRAINQEGGVLKAYQLTDSFTSFAKLGNQSGFLFYIPSAYTSKIDPGTGFVDPFIWSHVTASEENRNEFLKGFDSLKYDAQSSAFVLHFKMKSNKQFQKNNVEGFMPEWDICFEKNEEKISLQGSKYTAGKRIIFDSKKKQYMECFPQNELMKALQDVGITWNTGNDIWQDVLKQASTDTGFRHRMINLIRSVLQMRSSNGATGEDYINSPVMDLDGRFFDTRAGIRDLPLDADANGAYHIALKGRMVLERIRSQKNTAIKNTDWLYAIQEERN

SEQ ID NO: 4 - protein, 1300 aa, Francisella tularensis
MSIYQEFVNKYSLSKTLRFELIPQGKTLENIKARGLILDDEKRAKDYKKAKQIIDKYHQFFIEEILSSVCISEDLLQNYSDVYFKLKKSDDDNLQKDFKSAKDTIKKQISEYIKDSEKFKNLFNQNLIDAKKGQESDLILWLKQSKDNGIELFKANSDITDIDEALEIIKSFKGWTTYFKGFHENRKNVYSSNDIPTSIIYRIVDDNLPKFLENKAKYESLKDKAPEAINYEQIKKDLAEELTFDIDYKTSEVNQRVFSLDEVFEIANFNNYLNQSGITKFNTIIGGKFVNGENTKRKGINEYINLYSQQINDKTLKKYKMSVLFKQILSDTESKSFVIDKLEDDSDVVTTMQSFYEQIAAFKTVEEKSIKETLSLLFDDLKAQKLDLSKIYFKNDKSLTDLSQQVFDDYSVIGTAVLEYITQQIAPKNLDNPSKKEQELIAKKTEKAKYLSLETIKLALEEFNKHRDIDKQCRFEEILANFAAIPMIFDEIAQNKDNLAQISIKYQNQGKKDLLQASAEDDVKAIKDLLDQTNNLLHKLKIFHISQSEDKANILDKDEHFYLVFEECYFELANIVPLYNKIRNYITQKPYSDEKFKLNFENSTLANGWDKNKEPDNTAILFIKDDKYYLGVMNKKNNKIFDDKAIKENKGEGYKKIVYKLLPGANKMLPKVFFSAKSIKFYNPSEDILRIRNHSTHTKNGSPQKGYEKFEFNIEDCRKFIDFYKQSISKHPEWKDFGFRFSDTQRYNSIDEFYREVENQGYKLTFENISESYIDSVVNQGKLYLFQIYNKDFSAYSKGRPNLHTLYWKALFDERNLQDVVYKLNGEAELFYRKQSIPKKITHPAKEAIANKNKDNPKKESVFEYDLIKDKRFTEDKFFFHCPITINFKSSGANKFNDEINLLLKEKANDVHILSIDRGERHLAYYTLVDGKGNIIKQDTFNIIGNDRMKTNYHDKLAAIEKDRDSARKDWKKINNIKEMKEGYLSQVVHEIAKLVIEYNAIVVFEDLNFGFKRGRFKVEKQVYQKLEKMLIEKLNYLVFKDNEFDKTGGVLRAYQLTAPFETFKKMGKQTGIIYYVPAGFTSKICPVTGFVNQLYPKYESVSKSQEFFSKFDKICYNLDKGYFEFSFDYKNFGDKAAKGKWTIASFGSRLINFRNSDKNHNWDTREVYPTKELEKLLKDYSIEYGHGECIKAAICGESDKKFFAKLTSVLNTILQMRNSKTGTELDYLISPVADVNGNFFDSRQAPKNMPQDADANGAYHIGLKGLMLLGRIKNNQEGKKLNLVIKNEEYFEFVQNRNN

SEQ ID NO: 5 - protein, 1282 aa, Eubacterium eligens
MNGNRSIVYREFVGVIPVAKTLRNELRPVGHTQEHIIQNGLIQEDELRQEKSTELKNIMDDYYREYIDKSLSGVTDLDFTLLFELMNLVQSSPSKDNKKALEKEQSKMREQICTHLQSDSNYKNIFNAKLLKEILPDFIKNYNQYDVKDKAGKLETLALFNGFSTYFTDFFEKRKNVFTKEAVSTSIAYRIVHENSLIFLANMTSYKKISEKALDEIEVIEKNNQDKMGDWELNQIFNPDFYNMVLIQSGIDFYNEICGVVNAHMNLYCQQTKNNYNLFKMRKLHKQILAYTSTSFEVPKMFEDDMSVYNAVNAFIDETEKGNIIGKLKDIVNKYDELDEKRIYISKDFYETLSCFMSGNWNLITGCVENFYDENIHAKGKSKEEKVKKAVKEDKYKSINDVNDLVEKYIDEKERNEFKNSNAKQYIREISNIITDTETAHLEYDDHISLIESEEKADEMKKRLDMYMNMYHWAKAFIVDEVLDRDEMFYSDIDDIYNILENIVPLYNRVRNYVTQKPYNSKKIKLNFQSPTLANGWSQSKEFDNNAIILIRDNKYYLAIFNAKNKPDKKIIQGNSDKKNDNDYKKMVYNLLPGANKMLPKVFLSKKGIETFKPSDYIISGYNAHKHIKTSENFDISFCRDLIDYFKNSIEKHAEWRKYEFKFSATDSYSDISEFYREVEMQGYRIDWTYISEADINKLDEEGKIYLFQIYNKDFAENSTGKENLHTMYFKNIFSEENLKDIIIKLNGQAELFYRRASVKNPVKHKKDSVLVNKTYKNQLDNGDVVRIPIPDDIYNEIYKMYNGYIKESDLSEAAKEYLDKVEVRTAQKDIVKDYRYTVDKYFIHTPITINYKVTARNNVNDMVVKYIAQNDDIHVIGIDRGERNLIYISVIDSHGNIVKQKSYNILNNYDYKKKLVEKEKTREYARKNWKSIGNIKELKEGYISGVVHEIAMLIVEYNAIIAMEDLNYGFKRGRFKVERQVYQKFESMLINKLNYFASKEKSVDEPGGLLKGYQLTYVPDNIKNLGKQCGVIFYVPAAFTSKIDPSTGFISAFNFKSISTNASRKQFFMQFDEIRYCAEKDMFSFGFDYNNFDTYNITMGKTQWTVYTNGERLQSEFNNARRTGKTKSINLTETIKLLLEDNEINYADGHDIRIDMEKMDEDKKSEFFAQLLSLYKLTVQMRNSYTEAEEQENGISYDKIISPVINDEGEFFDSDNYKESDDKECKMPKDADANGAYCIALKGLYEVLKIKSEWTEDGFDRNCLKLPHAEWLDFIQNKRYE

SEQ ID NO: 6 - protein, 1300 aa, Francisella tularensis
MSIYQEFVNKYSLSKTLRFELIPQGKTLENIKARGLILDDEKRAKDYKKAKQIIDKYHQFFIEEILSSVCISEDLLQNYSDVYFKLKKSDDDNLQKDFKSAKDTIKKQISEYIKDSEKFKNLFNQNLIDAKKGQESDLILWLKQSKDNGIELFKANSDITDIDEALEIIKSFKGWTTYFKGFHENRKNVYSSDDIPTSIIYRIVDDNLPKFLENKAKYESLKDKAPEAINYEQIKKDLAEELTFDIDYKTSEVNQRVFSLDEVFEIANFNNYLNQSGITKFNTIIGGKFVNGENTKRKGINEYINLYSQQINDKTLKKYKMSVLFKQILSDTESKSFVIDKLEDDSDVVTTMQSFYEQIAAFKTVEEKSIKETLSLLFDDLKAQKLDLSKIYFKNDKSLTDLSQQVFDDYSVIGTAVLEYITQQVAPKNLDNPSKKEQDLIAKKTEKAKYLSLETIKLALEEFNKHRDIDKQCRFEEILANFAAIPMIFDEIAQNKDNLAQISLKYQNQGKKDLLQASAEEDVKAIKDLLDQTNNLLHRLKIFHISQSEDKANILDKDEHFYLVFEECYFELANIVPLYNKIRNYITQKPYSDEKFKLNFENSTLANGWDKNKEPDNTAILFIKDDKYYLGVMNKKNNKIFDDKAIKENKGEGYKKIVYKLLPGANKMLPKVFFSAKSIKFYNPSEDILRIRNHSTHTKNGNPQKGYEKFEFNIEDCRKFIDFYKESISKHPEWKDFGFRFSDTQRYNSIDEFYREVENQGYKLTFENISESYIDSVVNQGKLYLFQIYNKDFSAYSKGRPNLHTLYWKALFDERNLQDVVYKLNGEAELFYRKQSIPKKITHPAKEAIANKNKDNPKKESVFEYDLIKDKRFTEDKFFFHCPITINFKSSGANKFNDEINLLLKEKANDVHILSIDRGERHLAYYTLVDGKGNIIKQDTFNIIGNDRMKTNYHDKLAAIEKDRDSARKDWKKINNIKEMKEGYLSQVVHEIAKLVIEHNAIVVFEDLNFGFKRGRFKVEKQVYQKLEKMLIEKLNYLVFKDNEFDKTGGVLRAYQLTAPFETFKKMGKQTGIIYYVPAGFTSKICPVTGFVNQLYPKYESVSKSQEFFSKFDKICYNLDKGYFEFSFDYKNFGDKAAKGKWTIASFGSRLINFRNSDKNHNWDTREVYPTKELEKLLKDYSIEYGHGECIKAAICGESDKKFFAKLTSVLNTILQMRNSKTGTELDYLISPVADVNGNFFDSRQAPKNMPQDADANGAYHIGLKGLMLLDRIKNNQEGKKLNLVIKNEEYFEFVQNRNN

SEQ ID NO: 7 - protein, 1300 aa, Francisella tularensis; identical to SEQ ID NO: 6

SEQ ID NO: 8 - protein, 1249 aa, Butyrivibrio hungatei
MLNYEEFTKRNHITKALRMELIPQGKTQNVIDEKGDRKYDAALYSSLERLKPVIDSFIRSTASRALSDVDYDFNAMHDAYINKDKKSWAKEEKALKKVLMKAVDEALPKGLKCSQINSAAFLQEVLREYVLHATDTELRKDVALKDIEETKGCLALFSKFLTTRITALTVWMPERVIENFKIYCSNIPRIEAIFNEAKDIANNYSDELELMKTAQYYTKILSQDAIDGYNLVIAGKITENGIETKGLNVLINEYNIDVKNQKLDKPYLRKINQLYKQTLFSSEKQFVITAIKTDDEVRRVIKSAWESFDGAATKMLGLFKETLEATNGNGVCVKGNRLHILSHALLGEHKAITDNLVKAELVEIHEMLKNEALKPSMRAELEKRVDIAQSLVVKKDYSFTALDEAVTSIDENVIGLSKGAFNLYVAKTEELIKEAKMYYKVLEGGDIFKKRHIKGDKHVQEMLVDFFDALTEVRNIISVISMPDENEDADVSFYNRFDEIYENIRLTYKAENLVRNYITKSVKDTAEEKQTCFGTPARLRTQWWNGEQKFAKNHAAIIKHDGKYYYFILAGDSKPIEIKEDGNSATGLLTLKKGQKSFMMLPKILFTDHAVPFFEGNKDAMEYTLDDESVIRPVKVGRMLYEIYKKGLFKREAVTSGAITEEEYAKNIQALIEKYTEFANAYVQYQKFNLDDINDPTRYSDIGEFFSEVDTCTSRLSWTYIDYAQIANLVDSGSAYLFLISTKFLYTESEDKNAYTKTFRSILSDANMDKTTILLNSNPAVFFRPQSIKKEITHKAGSIMVNKLTEDGEHIPKKIYEAIYKSKNEMSGVSEEDMAAANEYMRTHKVRSFKAKYDKTYRGNYMSDKYTLQLTYTKNNDVSDRVNDMLNDRVIEAMQDGFNIVSVARSTKDMVYALVLDSSLKIIKELSLNVIDGVDYYALLHDTYLEKKENKKLWIYDTENTELKSAYIDLAISEILKLAREYNAVIAVESISDAVKNKYSFIDNQVFKAFENRIAQRLSDLTYKDVVDGRPGSVSNPLQLSNNNGNTYQDGILFFINGAYTRGIDPSSGFTSLFDFSRYNSIASKRQFFSKMAKISYTGDSIVFDFDYVDYPVHVDTEKTKWQVKLSGDVVVYDREKKQNKRIKDVVNEIIIPLAGKTDLNGNIAENILNKDVPGAFVEELFRWFRYAVTGIHAQVKGKDEFYKSPVDGNEYNISNMLAFNLAKKLVFRLEYAGESKDFTKEWLNYMQA

SEQ ID NO: 9 - protein, 1300 aa, Francisella tularensis
MSIYQEFVNKYSLSKTLRFELIPQGKTLENIKARGLILDDEKRAKDYKKAKQIIDKYHQFFIEEILSSVCISEDLLQNYSDVYFKLKKSDDDNLQKDFKSAKDSIKKQISKYINDSEKFKNLFNQNLIDAKKGQESDLILWLKQSKDNGIELFKANSDITDIDEALEIIKSFKGWTTYFKGFHENRKNVYSSNDIPTSIIYRIVDDNLPKFLENKAKYESLKDKAPEAINYEQIKKDLAEELTFDIDYKTSEVNQRVFSLDEVFEIANFNNYLNQSGITKFNTIIGGKFVNGENTKRKGINEYINLYSQQINDKTLKKYKMSVLFKQILSDTESKSFVIDKLEDDSDVVTTMQSFYEQIAAFKTVEEKSIKETLSLLFDDLKAQKLDLSKIYFKNDKSLTDLSQQVFDDYSVIGTAVLEYITQQVAPKNLDNPSKKEQDLIAKKTEKAKYLSLETIKLALEEFNKHRDIDKQCRFEEILANFAAIPMIFDEIAQNKDNLAQISIKYQNQGKKDLLQASAEDDVKAIKDLLDQTNNLLHRLKIFHISQSEDKANILDKDEHFYLVFEECYFELANIVPLYNKIRNYITQKPYSDEKFKLNFENSTLANGWDKNKEPDNTAILFIKDDKYYLGVMNKKNNKIFDDKAIKENKGEGYKKIVYKLLPGANKMLPKVFFSAKSIKFYNPSEDILRIRNHSTHTKNGNPQKGYEKFEFNIEDCRKFIDFYKESISKHPEWKDFGFRFSDTQRYNSIDEFYREVENQGYKLTFENISESYIDSVVNQGKLYLFQIYNKDFSAYSKGRPNLHTLYWKALFDERNLQDVVYKLNGEAELFYRKQSIPKKITHPAKEAIANKNKDNPKKESFFEYDLIKDKRFTEDKFFFHCPIKINFKSSGANKFNDEINLLLKEKANDVHILSIDRGERHLAYYTLVDGKGNIIKQDTFNIIGNDRMKTNYHDKLAAIEKDRDSARKDWKKINNIKEMKEGYLSQVVHEIAKLVIEHNAIVVFEDLNFGFKRGRFKVEKQVYQKLEKMLIEKLNYLVFKDNEFDKTGGVLRAYQLTAPFETFKKMGKQTGIIYYVPAGFTSKICPVTGFVNQLYPKYESVSKSQEFFSKFDKICYNLDKGYFEFSFDYKNFGDKAAKGKWTIASFGSRLINFRNSDKNHNWDTREVYPTKELEKLLKDYSIEYGHGECIKAAICGESDKKFFAKLTSILNTILQMRNSKTGTELDYLISPVADVNGNFFDSRQAPKNMPQDADANGAYHIGLKGLMLLDRIKNNQEGKKLNLVIKNEEYFEFVQNRNN

SEQ ID NO: 10 - protein, 1265 aa, unidentified
  REGION 1..1265: note = Sequence from GenBank assembly GCA_001916615.1
MERKDFINYDQVSKTIRNGLIPTEYTLKNIEETGVLVSDEYRAEVRNVLKKIMDDYYKEYINMCLNREIKMDWRPLFDAYELVKKGKMKPKEIENIQDEKRKEIYDILSAHDEFKKMFSAKMITELLPQFISQSTGYNEDEKKQYEEVIHIYSRFTSDFTDFFQNRKNVFSSAGIATSICNRIVNENAEIFSDNKSTFDRIKKDISYIDEIIDSDLKTYLDGWELEQIYSVDFYSRLMSQSGIDFYNMISGAVNKAVNEYCQKNGLNKNKYLLRKLRKQILSNSESTFQIPEKFLADEEVYKAVGQFIDNIKSKNVIEILKDIGSNCENYDLRRIYIAESAYEDVSIFMGYGWNGIKGCLEKKYEKEIAPGKAKDIKIKKLISQEKERSIGEIDELFHIYGEEKDGKAAIQYIEEVVELCNEVPTRLVYDSSEKLTENDNKAAEIKNVLDYYFKIFHWIKTFITDDILDKDIVFYSGIEFAYEEIKDIVPLYNKVRNYVTQKPYSSEKIKLKFGTPTLANGWSKSKEFDNNAILLVRDNKYYLGIFNVLNKPDKKIMAGYANKKNSSDYAKMVYNLLPGPSKMLPKVCLSQKGKDTYHPSAYIVDNYERKAHVKSSEHFSIQYCHDLIDYFKECIKRNDDWKCFDFKFSDTEQYNDISEFYKEVELQGYSIGWTYISGEDIEALDKEGKLYLFQIYNKDFSEQSHGTDNLHTMYLKNLFSPENLNNIVLKLNGEAELFYRKSSIKKPVVHKKGSILVNKTYTEKTGNGEEVRRPVPDDVYLELVNYYNGEQKAILSDEAKKYMKVVEHHEAVKDITKDYRYTVNKFFIHLPITINFKAEHTGNLNEMVIQYIAKQENMHVIGIDRGERNLIYVSVIDMNGKIKEQKSFNIVNSYNYQEKLRGREKDRLNARKNWKQIANIKEMKEGYLSLVIHEITEMMMKYNAIIAMEDLNYGFKRGRFKVERQVYQKFETMLISKLNYLVDKHKKVDEPGGLLRGYQFAYVPASLDRLGRQCGFIFYVPAAYTSKIDPTTGFVDLFNHSELIKAGKRRDNLSKFDGIYYDEQKDMFCYAFDYKNFVTHNTDIYQNSWEIYTNKERLRKIFGNGRPTGKTEKIELTQMMKEVLTGAGVEYKDGHNLIDDILNSNDNCIKQVLDIFLYSIQLRNSKGENEDSKESDYDRIISPVLNQENEFFDSVVYADKYKKDEKLADKPIDADANGAYCIALKGLYEILQIKNNWKEGEVFSRDTLKITNADWLRFMQSRGFE

SEQ ID NO: 11 - protein, 1261 aa, unidentified
  REGION 1..1261: note = Sequence from GenBank assembly GCA_002224245.2
MNTSLFSSFTRQYPVTKTLRFELKPMGATLGHIQQKGFLHKDEELAKIYKKIKELLDEYHRAFIADTLGDAQLVGLDDFYADYQALKQDSKNSHLKDKLTKTQDNLRKQITKNFEKTPQLKERYKRLFTKELFKAGKDKGDLEKWLINHDSEPNKAEKISWIHQFENFTTYFQGFYENRKNMYSDEVKHTAIAYRLIHENLPRFVDNIQVLSKIKSDYPDLYHELNHLDSRTIDFADFKFDDMLQMDFYHHLLIQSGITAYNTLLGGKVLEGGKKLQGINELINLYGQKHKIKIAKLKPLHKQILSDGQSVSFLPKKFDNDYELCQTVNHFYREYVAIFDELVVLFQKFYDYDKDNIYINHQQLNQLSHELFADFRLLSRALDFYYCQIIDGDFNNKINNAKSQNAKEKLLKEKERYTKSNHSINELQKAINHYASHHEDTEVKVISDYFSATNIRNMIDGIHHHFSTIKGFLEKDNNQGESYLPKQKNSNDVKNLKLFLDGVLRLIHFIKPLALKSDDTLEKEEHFYGEFMPLYDKLVMFTLLYNKVRDYISQKPYNDEKIKLNFGNSTLLNGWDVNKEKDNFGVILCKEGLYYLAILDKSHKKVFDNAPKATSSHTYQKMVYKLLPGPNKMLPKVFFAKSNIGYYQPSAQLLENYEKGTHKKGSNFSLTDCHHLIDFFKSSIAKHPEWKEFGFRFSDTHTYQDLSDFYKEIEPQSYKVKFIDIDADYIDDLVEKGQLYLFQLYNKDFSKQSYGKPNLHTLYFKSLFSDDNLKNPIYKLNGEAEIFYRRASLSVSDTTIHQAGEILTPKNPNNTHNRTLSYDVIKNKRYTTDKFFLHIPITMNFGIENTGFKAFNHQVNTTLKNADKKDVHIIGIDRGERHLLYVSVIDGDGRIVEQRTLNDIVSISNNGMSMSTPYHQILDNREKERLAARTDWGDIKNIKELKAGYLSHVVHEVVQMMLKYNAMIVLEDLNFGFKHGRFKVEKQVYQNFENALIKKLNYLVLKNADNHQLGSVRKALQLTNNFTDIKSIGKQTGFIFYVPAWNTSKIDPTTGFVDLLKPRYENMAQAQSFISRFKKIAYNHQLDYFEFEFDYADFYQKTIDKKRIWTLCTYGDVRYYYDHKTKETKTVNITKELKSLLDKHDLSYQNGHNLVDELANSHDKSLLSGVMYLLKVLLALRYSHAQKNEDFILSPVMNKDGVFFDSRFADDVLPNNADANGAYHIALKGLWVLNQIQSADNMDKIDLSISNEQWLHFTQSR

SEQ ID NO: 12 - protein, 1258 aa, unidentified
  REGION 1..1258: note = Sequence from GenBank assembly GCA_002320275.1
TMKYTDFTGIYSVSKTLRFELIPQGSTVENMKREGILNNDMHRADSYKEMKKLIDEYHKAFIERCLSDFSLKYDDTGKHDSLEEYFFYYEQKRNDKTKKIFEDIQVALRKQISKRFTGDTAFKRLFKKELIKEDLPSFVKNDPVKTELIKEFSDFTTYFQEFHKNRKNMYTSDAKSTAIAYRIINENLPKFIDNINAFDIVAKVPEMQEHFKTIADELRSHLQVGNDIDKMFNLQFFNKVLTQSQLDVYNAVIGGKSEGNKKIQGINEYINLYNQQHKKARLPMLKLLYKQILSDRVAISWLQDEFDNDQDMLDTIEAFYNKLNSNETGVLGEGKLKQILMGLDGYNLDGVFLRNDLQLSEVSQRLCGGWNIIKDAMISDLKRSVQKKKKETDADFEERVSKLFSAQNSFSIAYINQCLGQAGIRCKIQDYFACLGAKEGENEAETTPDIFDQIAEAYHGAAPILNARPSSHNLAQDIEKVKAIKALLDALKRLQRFVKPLLGRGDEGDKDNFFYGDFMPIWEVLDQLTPLYNKVRNRMTRKPYSQEKIKLNFENSTLLNGWDLNKEHDNTSVILRREGLYYLGIMNKNYNKIFDANNVETIGDCYEKMIYKLLPGPNKMLPKVFFSKSREQEFSPSKKILEIWESKSFKKGDNFNLDDCHALIDFYKDSIAKHPDWNKFNFKFSDTQSYTNISDFYRDVSQQGYSLSFTKVSVDYVNRMVDEGKLYLFQIYNKDFSPQSKGTPNMHTLYWRMLFDERNLHNVIYKLNGEAEVFYRKASLRCDRPTHPAHQPITCKNENDSKRVCVFDYDIIKNRRYTVDKFMFHVPITINYKCTGSDNINQQVCDYLRSAGDDTHIIGIDRGERNLLYLVIIDQHGTIKEQFSLNEIVNEYKGNTYCTNYHTLLEEKEAGNKKARQDWQTIESIKELKEGYLSQVIHKISMLMQRYHAIVVLEDLNGSFMRSRQKVEKQVYQKFEHMLINKLNYLVNKQYDATEPGGLLHALQLTSRMDSFKKLGKQSGFLFYIPAWNTSKIDPVTGFVNLFDTRYCNEAKAKEFFEKFDDISYNDERDWFEFSFDYRHFTNKPTGTRTQWTLCTQGTRVRTFRNPEKSNHWDNEEFDLTQAFKDLFNKYGIDIASGLKARIVNGQLTKETSAVKDFYESLLKLLKLTLQMRNSVTGTDIDYLVSPVADKDGIFFDSRTCGSLLPANADANGAFNIARKGLMLLRQIQQSSIDAEKIQLAPIKNEDWLEFAQEKPYL

SEQ ID NO: 13 - protein, 1234 aa, unidentified
  REGION 1..1234: note = Sequence from GenBank assembly GCA_002392345.1
MKKIDNFINLYPVTKTLRFKLIPVGKTKENFDGEKLLEVDKKKAEDYSKAKLIIDKYYNTFINNCLNNFKFKTNPDNLKNYYDVYNASFENKKEKSNKITELQKRLREEICSKFREHSEYDKLFKEGLLRLILSDNRMSEEEREVILQFDKFSTYLQGFFINRKNIFESEEKVGSIAYRCINDNLKIFIDNIKVYLKIKEVLREDINTLEKELADILKSFKIKDIFNIEYYNLCLTGEDINKYNSIIGGYSVNEKTKIKGLNEYINLYNQKNKGQTKLPKFKQLFKQILSEDKTKTFRFDVITSDDLVYDLIDALLEKIENKDESIFKNILGVFDGLTKGLYDYRTIYLSSAKFSDISIKCCKDYNAINLGMSIDYDENHKVGKNKEKYERDKSKYLKEIKDLSLVNVCRLIKKAGFSDEGVVETIENELEEIVNEINKAVLEYKKIDRSLSIKSDENVVERIKGVLDWLLKLHKFKEMFCGASETEEKDLAFYGELGELDFLNDIVSIYNKVRNYSTKKPYKLDKIKLNFNCPTLLDGWDVNKEIDNLGVLFLKEGKYFLGIINKTDNKIFTNIIDMEESKNYYMKVNYKLLPGPNKMLPKVFLSNKGIENFKPSKEILQNYSKGTHKKGEDFKKSDMIKLIDYFKESIDKHVDYSKFGFKFTDTSKYKDISEFYKEVADQGYKITYTNIPDEYIDKWVDEGKLYLFQLYNKDFSNYSKGIKNLHTMYFEELFDEQNLKEVVYKLNGKAEIFLREKSMDYRVTHPKNKPIFNKNIANKKKESIFEYNLVKDRRFTDDQFEFHVPITINFKADSGVFNDGVNESIKKCNDNYVIGIDRGERNLIYVNVVSEKRGLIEQISLNDIINEYKGNIYKTDYHDLLDKKEKERDIARKSWKTIENIKELKEGYVSQVVHKICELVEKYDAIIVMEDLNSGFKNSRIKVEKQVYQKFEKMLIDKLNLYINKKSQPSVNGGLLKAYQLTRPYEGNAKMAFQNGFIFYVAPWNTSKIDPTTGFVNLFRLNNYTSVKTKKEFINRFKSIKYNIEEHVFEFVFNYEDFDYGATDYQKKWTISSYGKRILTFRNKDRNNNWDYKEIDLTKELVDLLGQYQVEYTSGNGDIKEKILEIDEGKFYDKLFWILKLILQIRNSRPKQKESDLVIDYLASPVKNRKGQYFNSSEVKEGTFLPKDADSNGAYNIARKGLMIIERIKKDQSDKLTVISNREWLEYAQTHLPF

SEQ ID NO: 14 - protein, 787 aa, unidentified
  REGION 1..787: note = Sequence from GenBank assembly GCA_002483765.1
MENRNRVWYNHIDDFVNKFQVIGVYNMVRNHITKKTATAEKLKINFENATLLDGWDRNKEADNYGILLEKDNLFYLAIMTADSNRLFDYAAITDDSAKKIEEKRERRKSLLASGNENSYRKMNYKQIASVGKDIFTLCWDNATNTAIRKTKDRESVWGEEITRIKESKSYQNNESDRLTYFSYLLKCAQSYWKHFNLDLKAAEGYDSLSDLLNNIANQGYSISFDNVKKTYIDEKVATGELYLFQIYSKDFSATKKSGGRDNLHTIYWKALFAPENLEKTVLKLNGQAEIFFRQASIKYDADIIRAGHHAEKLKGKFNYPIIKNKRFTENKFFFHCPIKLNFNAPNVPGRFNDHVREFLKNNPDINIIGIDRGEKHLLYYSVINQNGNILKQGSLNEISNGFVPRGETGERAINYHAKLDEVEKKRDLARKSWSMIENIKELKAGYLSQVVHKLAELIIRHNAIVVLEDLNWGFKRGRFKVEKQVYQKFEKALIDKLNYLVFKDCSDTTLPGHFLNAYQLTNKFESFQKMGKQSGILFYTTASYTSTTDPVTGFLKNVNPKYQKLEKSLEFWKSFDSIIYNPTENRFEFTYTLGKIASKNMHREKDEKDEQLKKRTWTVCSCVTRSRYVKTEKQTNEQKQNTSAAQIGNKGKHETFVVTDEIKKLLLDNNIDFARNANIQASLTAKNDVAFHKSMIYYFNAIMTMRVTDSDKTSGTNDNDFILSPVEPFFDSRKTHPGLPENGDANGAYNIARKGVCILQKINAADDVSKVNPAVSKQEWQNFCQNI

SEQ ID NO: 15 - protein, 1263 aa, Eubacterium rectale
MNNGTNNFQNFIGISSLQKTLRNALIPTETTQQFIVKNGIIKEDELRGENRQILKDIMDDYYRGFISETLSSIDDIDWTSLFEKMEIQLKNGDNKDTLIKEQAEKRKAIYKKFADDDRFKNMFSAKLISDILPEFVIHNNNYSASEKEEKTQVIKLFSRFATSFKDYFKNRANCFSADDISSSSCHRIVNDNAEIFFSNALVYRRIVKNLSNDDINKISGDMKDSLKEMSLEEIYSYEKYGKFITQEGISFYNDICGKVNSFMNLYCQKNKENKNLYKLRKLHKQILCIADSSYEVPYKFESDEEVYQSVNGFLDSISSKHIVERLRKIGDNYNGYNLDKIYIVSKFYESVSQKTYRDWETINTALEIHYNNILPGNGKSKADKVKKAVKNDLQKSITEINELVSNYKLCPDDNIKAETYIHEISHILNNFEAQELKYNPEIHLVESEFKASELKNVLDVIMNAFHWCSVFMTEELVDKDNNFYAELEEIYDEIYPVISLYNLVRNYVTQKPYSTKKIKLNFGIPTLADGWSKSKEYSNNAIILMRDNLYYLGIFNAKNKPDKKIIEGNTSENKGDYKKMIYNLLPGPNKMIPWVFLSSKTGVETYKPSAYILEGYKQNKHLKSSKDFDITFCHDLIDYFKNCIAIHPEWKNFGFEFSDTSTYEDISGFYREVELQGYKIDWTYISEKDIELLQEKGQLYLFQIYNKDFSKKSTGNDNLHTMYLKNLFSEENLKDIVLKLNGKAEIFFRKSSIKNPIIHKKGSILVNRTYEAEEKDQFGNTQIVRKTIPENIYQELYKYYNDKSDKELSDEAAKLKDIVGHHEAATNIVKDYRYTYDKYFLHMPITINFKANKTSFINDRILQYIAKEKDLHVIGIDRGERNLIYVSVIDTCGNIVEQKSFNIVNGYDYQIKLKQQEGARQIARKEWKEIGKIKEIKEGYLSLVIHEISKMVIKYNAIIAMEDLSYGFKKGRFKVERQVYQKFETMLINKLNYLVFKDISITENGGLLKGYQLTYIPEKLKNVGHQCGCIFYVPAAYTSKIDPTTGFVNIFKFKDLTVDAKREFIKKFDSIRYDSEKNLFCFTFDYNNFITQNTVMSKSSWSVYTYGVRIKRRFVNGRFSNESDTIDITKDMEKTLEMTDINWRDGHDLRQDIIDHEIVQHIFEIFRLTVQMRNSLSELEDRDYDRLISPVLNKNNIFYDSAKAGDALPKDADANGAYCIALKGLYEIKQITENWKEDGKFSRDKLKISNKDWFDFIQNKRYL

SEQ ID NO: 16 - protein, 1272 aa, unidentified
  REGION 1..1272: note = Sequence from GenBank assembly GCA_900066075.1
MEDKQFLERYKEFIGLNSLSKTLRNSLIPVGSTLKHIQEYGILEEDSLRAQKREELKGIMDDYYRNYIEMHLRDVHDIDWNELFEALTEVKKNQTDDAKKCLEKIQEKKRKEIYQYLSDDAVFSEMFKEKMISGILPDFIRCNEEYSEEEKEEKLKTVALFHRFTSSFNDFFLNRKNVFTKEAIATAIGYRVVHENAEIFLENMVAFQNIQKSAESQISIIERKNEHYFMEWKLSHIFTADYYMMLMTQKAIEHYNEMCGVVNQHMKEYCQKEKKNWNLYRMKRLHKQILSNASTSFKIPEKYENDAEVYESVNSFLQNVMEKTVMERIAVLKNNTDNFDLSKIYITAPYYEKISNYLCGSWNTIADCLTHYYEQQIAGKGARKDQKVKAAVKADKWKSLSEIEQLLKEYARAEEVKRKPEEYIAEIENIVSLKEVHLLEYHPEVNLIENEKYATEIKDVLDNYMELFHWMKWFYIEEAVEKEVNFYGELDDLYEEIRDIVPLYNKVRNYVTQKPYSDTKIKLNFGTPTLANGWSKSKEYDYNAILLQKDGKYYMGIFNPVQKPEKEIIEGHSHPLEGNEYKKMVYYYLPSANKMLPKVLLSKKGMEIYQPSEYIINGYKERRHIKSEEKFDLQFCHDLIDYFKSGIERNPDWKVFGFHFSDTDTYQDISGFYREVEDQGYKIDWTYIKEADIDRLNEEGKLYLFQIYNKDFSEKSTGRENLHTMYLKNLFSEENIREQVLKLNGEAEIFFRKSSVKKPIIHKKGTMLVNRTYMEEMHGESVKKNIPEKEYQEIYNYMNHRWKGELSAEAKEYLKKAVCHETKKDIVKDYRYSVDKFFIHLPITINYRASGKEALNSVAQRYIAHQNDMHVIGIDRGERNLIYVSVINMQGEIIEQKSFNVVNKYNYKEKLKEREQNRDEARKNWKEIGQIKDLKEGYLSGVIHEIAKMMIKYHAIVAMEDLNYGFKRGRFKVERQVYQKFENMLIQKLNYLVFKDRSADEDGGVLRGYQLAYIPDSVKKLGRQCGMIFYVPAAFTSKIDPATGFVDIFNHKAYTTDQAKREFILSFDEICYDVERQLFRFTFDYANFATHNVTLARNNWTIYTNGTRTQKEFVNRRVRDKKEVFDPTEKMLKLLELEGVEYQSGANLLPKLEKISDPHLFHELQRIVRFTVQLRNSKNEENDVDYDHVISPVLNEEGKFFDSSKYENKEEKKESLLPVDADANGAYCIALKGLYIMQAIQKNWSEEKALSPDVLRLNNNDWFDYIQNKRYR

SEQ ID NO: 17 - protein, 1287 aa, Coprococcus eutactus
MNNNTNNSFEPFIGGNSVSKTLRNELRVGSEYTGKHIKECAIIAEDAVKAENQYIVKEMMDDFYRDFINRKLDALQGINWEQLFDIMKKAKLDKSNKVSKELDKIQESTRKEIVKIFSSDPIYKDMLKADMISKILPEYIVDKYGDAASRIEAVKVFYGFSGYFIDFWASRKNVFSDKNIASAIPHRIVNVNARIHLDNITAFNRIAEIAGDEVAGIAEDACAYLQNMSLEDVFTGACYGEFICQKDIDRYNNICGVINQHMNQYCQNKKISRSKFKMERLHKQILCRSESGFEIPIGFQTDGEVIDAINSFSTILEEKDILDRLRTLSQEVTGYDMERIYVSSKAFESVSKYIDHKWDVIASSMYNYFSGAVRGKDDKKDAKIQTEIKKIKSCSLLDLKKLVDMYYKMDGMCLEHEATEYVAGITEILVDFNYKTFDMDDSVKMIQNEHMINEIKEYLDTYMSIYHWAKDFMIDELVDRDMEFYSELDEIYYDLSDIVPLYNKVRNYVTQKPYSQDKIKLNFGSPTLANGWSKSKEFDNNVVVLLRDEKIYLAILNVGNKPSKDIMAGEDRRRSDTDYKKMNYYLLPGASKTLPHVFISSNAWKKSHGIPDEIMYGYNQNKHLKSSPNFDLEFCRKLIDYYKECIDSYPNYQIFNFKFAATETYNDISEFYKDVERQGYKIEWSYISEDDINQMDRDGQIYLFQIYNKDFAPNSKGMQNLHTLYLKNIFSEENLSDVVIKLNGEAELFFRKSSIQHKRGHKKGSVLVNKTYKTTEKTENGQGEIEVIESVPDQCYLELVKYWSEGGVGQLSEEASKYKDKVSHYAATMDIVKDRRYTEDKFFIHMPITINFKADNRNNVNEKVLKFIAENDDLHVIGIDRGERNLLYVSVIDSRGRIVEQKSFNIVENYESSKNVIRRHDYKGKLVNKEHYRNEARKSWKEIGKIKEIKEGYLSQVIHEISKLVLKYNAIIVMEDLNYGFKRGRFKVERQVYQKFETMLINKLAYLVDKSRAVDEPGGLLKGYQLTYVPDNLGELGSQCGIIFYVPAAYTSKIDPVTGFVDVFDFKAYSNAEARLDFINKLDCIRYDASRNKFEIAFDYGNFRTHHTTLAKTSWTIFIHGDRIKKERGSYGWKDEIIDIEARIRKLFEDTDIEYADGHNLIGDINELESPIQKKFVGELFDIIRFTVQLRNSKSEKYDGTEKEYDKIISPVMDEEGVFFTTDSYIRADGTELPKDADANGAYCIALKGLYDVLAVKKYWKEGEKFDRKLLAITNYNWFDFIQNRRF

SEQ ID NO: 18 - protein, 1263 aa, Eubacterium rectale
MNNGTNNFQNFIGISSLQKTLRNALIPTETTQQFIVKNGIIKEDELRGENRQILKDIMDDYYRGFISETLSSIDDIDWTSLFEKMEIQLKNGDNKDTLIKEQAEKRKAIYKKFADDDRFKNMFSAKLISDILPEFVIHNNNYSASEKEEKTQVIKLFSRFATSFKDYFKNRANCFSADDISSSSCHRIVNDNAEIFFSNALVYRRIVKNLSNDDINKISGDMKDSLKEMSLDEIYSYEKYGEFITQEGISFYNDICGKVNSFMNLYCQKNKENKNLYKLRKLHKQILCIADTSYEVPYKFESDEEVYQSVNGFLDNISSKHIVERLRKIGDNYNGYNLDKIYIVSRFYESVSQKTYRDWETINTALEIHYNNILPGNGKSKADKVKKAVKNDLQKSITEINELVSNYKLCPDDNIKAETYIHEISHILNNFEAQELKYNPEIHLVESELKASELKNVLDVIMNAFHWCSVFMTEELVDKDNNFYAELEEIYDEIYPVISLYNLVRNYVTQKPYSTKKIKLNFGIPTLADGWSKSKEYSNNAIILMRDNLYYLGIFNAKNKPDKKIIEGNTSENKGDYKKMIYNLLPGPNKMIPKVFLSSKTGVETYKPSAYILEGYKQNKHLKSSKDFDITFCRDLIDYFKNCIAIHPEWKNFGFDFSDTSTYEDISGFYREVELQGYKIDWTYISEKDIDLLQEKGQLYLFQIYNKDFSKKSTGNDNLHTMYLKNLFSEENLKDIVLKLNGEAEIFFRKSSIKNPIIHKKGSILVNRTYEAEEKDQFGNIQIVRKTIPENIYQELYKYFNDKSDKELSDEAAKLKNVVGHHEAATNIVKDYRYTYDKYFLHMPITINFKANKTSFINDRILQYIAKENDLHVIGIDRGERNLIYVSVIDTCGNIVEQKSFNIVNGYDYQIKLKQQEGARQIARKEWKEIGKIKEIKEGYLSLVIHEISKMVIKYNAIIAMEDLSYGFKKGRFKVERQVYQKFETMLINKLNYLVFKDISITENGGLLKGYQLTYIPEKLKNVGHQCGCIFYVPAAYTSKIDPTTGFANIFKFKDLTVDAKREFIKKFDSIRYDSEKNLFCFTFDYNNFITQNTVMSKSSWSVYTYGVRIKRRFVNGRFSNESDTIDITKDMEKTLEMTDINWRDGHDLRQDIIDYEIVQHIFEIFKLTVQMRNSLSELEDRDYDRLISPVLNENNIFYDSAKAGDALPKDADANGAYCIALKGLYEIKQITENWKEDGKFSRDKLKISNKDWFDFIQNKRYL

SEQ ID NO: 19 - protein, 1305 aa, Lachnospira pectinoschiza
MNKAADNYTGGNYDEFIALSKVQKTLRNELKPTPFTAEHIKQRGIISEDEYRAQQSLELKKIADEYYRNYITHKLNDINNLDFYNLFDAIEEKYKKNDKDNRDKLDLVEKSKRGEIAKMLSADDNFKSMFEAKLITKLLPDYVERNYTGEDKEKALETLALFKGFTTYFKGYFKTRKNMFSGEGGASSICHRIVNVNASIFYDNLKTFMRIQEKAGDEIALIEEELTEKLDGWRLEHIFSRDYYNEVLAQKGIDYYNQICGDINKHMNLYCQQNKFKANIFKMMKLQKQIMGISEKVFEIPPMYQNDEEVYASFNEFISRLEEVKLTDRLRNILQNINIYNTAKIYINARYYTNVSTYVYGGWGVIESAIERYLCNTIAGKGQSKVKKIENAKKDNKFMSVKELDSIVAEYEPDYFNAPYIDDDDNAVKVFGGQGVLGYFNKMSELLADVSLYTIDYNSDDSLIENKESALRIKKQLDDIMSLYHWLQTFIIDEVVEKDNAFYAELEDICCELENVVTLYDRIRNYVTRKPYSTQKFKLNFASPTLASGWSRSKEFDNNAIILLRNNKYYIAIFNVNNKPDKQIIKGSEEQRLSTDYKKMVYNLLPGPNKMLPKVFIKSDTGKRDYNPSSYILEGYEKNRHIKSSGNFDINYCHDLIDYYKACINKHPEWKNYGFKFKETNQYNDIGQFYKDVEKQGYSISWAYISEEDINKLDEEGKIYLFEIYNKDLSAHSTGRDNLHTMYLKNIFSEDNLKNICIELNGEAELFYRKSSMKSNITHKKDTILVNKTYINETGVRVSLSDEDYMKVYNYYNNNYVIDTENDKNLIDIIEKIGHRKSKIDIVKDKRYTEDKYFLYLPITINYGIEDENVNSKIIEYIAKQDNMNVIGIDRGERNLIYISVIDNKGNIIEQKSFNLVNNYDYKNKLKNMEKTRDNARKNWQEIGKIKDVKSGYLSGVISKIARMVIDYNAIIVMEDLNKGFKRGRFKVERQVYQKFENMLISKLNYLVFKERKADENGGILRGYQLTYIPKSIKNVGKQCGCIFYVPAAYTSKIDPATGFINIFDFKKYSGSGINAKVKDKKEFLMSMNSIRYINEGSEEYEKIGHRELFAFSFDYNNFKTYNVSSPVNEWTAYTYGERIKKLYKDGRWLRSEVLNLTENLIKLMEQYNIEYKDGHDIREDISHMDETRNADFICSLFEELKYTVQLRNSKSEAEDENYDRLVSPILNSSNGFYDSSDYMENENNTTHTMPKDADANGAYCIALKGLYEINKIKQNWSDDKKFKENELYINVTEWLDYIQNRRFE

SEQ ID NO: 20 - protein, 987 aa, Moraxella ovis
INSHHNQHCHKSERIAKLRPLHKQILSDGMGVSFLPSKFADDSEMCQAVNEFYRHYADVFAKVQSLFDGFDDHQKDGIYVEHKNLNELSKQAFGDFALLGRVLDGYYVDVVNPEFNDKFAKAKTDNTKAKLTKEKDKFIKGVHSLASLEQAIEHYTARHDDESVQAGKLGQYFKHGLAGVDNPIQKIHNNHSTIKGFLERERPAGERALPKIKSDKSPEIRQLKELLDNALNVVHFTKLLTTKTTLDNQDGNFYGEFGVLYDELAKTPTLYNKVRDYLSQKPFSTEKYKLNFGNPTLLNGWDLNKEKDNFGVILQKDGCYYLALLDKAHKKVFDNAPNTGKNVYQKMIYKLLPGPNKMLPKVFFAKSNLDYYNPSAELLDKYAQGTHKKGDNFNLKDCHALIDFFKAGINKHPEWQHFGFKFSPTSSYQDLSDFYREVEPQGYQVKFVDINADYIDELVEQGQLYLFQIYNKDFSPKAHGKPNLHTLYFKALFSEDNLANPIYKLNGEAQIFYRKASLDMNETTIHCAGEVLENKNPDNPKKRQFVYDIIKDKRYTQDKFMLHVPITMNFGVQGMTIKEFNKKVNQSIQQYDEVNVIGIDRGERHLLYLTVINSKGEILEQRSLNDITTASVNGTQMTTPYHKILDKREIERLNARVGWGEIETIKELKSGYLSHVVHQISQLMLKYNAIVVLEDLNFGFKRGRFKVEKQIYQNFENALIKKLNHLVLKDKADDEIGSYKNALQLTNNFTDLKSIGKQTGFLFYVPAWNTSKIDPETGFVDLLKPRYENIAQSQAFFGKFDKICYNADRGYFEFHIDYAKFTDKAKNSRQIWKICSHGDKRYVYDKTANQNKGATIGVNVNDELKSLFTRYHINDKQPNLVMDICQNNDKEFHKLLMYLLKTLLALRYSNASSDEDFILSPVANDEGVFFNSALADDTQPQNADANGAYHIALKGLWVLEQIKNSDDLNKVKLAIDNQTWLNFAQNR

SEQ ID NO: 21 - protein, 1271 aa, Leptospira sp.
MKNLANFTNLYSLQKTLRFELKPIGKTLDWIIKKDLLKQDEILAEDYKIVKKIIDRYHKDFIDLAFESAYLQKKSSDSFTAIMEASIQSYSELYFIKEKSDRDKKAMEEISGIMRKEIVECFTGKYSEVVKKKFGNLFKKELIKEDLLNFCEPDELPIIQKFADFTTYFTGFHENRENMYSNEEKATAIANRLIRENLPRYLDNLRIIRSIQGRYKDFGWKDLESNLKRIDKNLQYSDFLTENGFVYTFSQKGIDRYNLILGGQSVESGEKIQGLNELINLYRQKNQLDRRQLPNLKELYKQILSDRTRHSFVPEKFSSDKALLRSLLDFHKEVIQNKNLFEEKQVSLLQAIRETLTDLKSFDLDRIYLTNDTSLTQISNFVFGDWSKVKTILAIYFDENIANPKDRQRQSNSYLKAKENWLKKNYYSIHELNEAISVYGKHSDEELPNTKIEDYFSGLQTKDETKKPIDVLDAIVSKYADLESLLTKEYPEDKNLKSDKGSIEKIKNYLDSIKLLQNFLKPLKPKKVQDEKDLGFYNDLELYLESLESANSLYNKVRNYLTGKEYSDEKIKLNFKNSTLLDGWDENKETSNLSVIFRDTNNYYLGILDKQNNRIFESIPEIQSGEETIQKMVYKLLPGANNMLPKVFFSEKGLLKFNPSDEITSLYSEGRFKKGDKFSINSLHTLIDFYKKSLAVHEDWSVFNFKFDETSHYEDISQFYRQVESQGYKITFKPISKKYIDTLVEDGKLYLFQIYNKDFSQNKKGGGKPNLHTIYFKSLFEKENLKDVIVKLNGQAEVFFRKKSIHYDENITRYGHHSELLKGRFSYPILKDKRFTEDKFQFHFPITLNFKSGEIKQFNARVNSYLKHNKDVKIIGIDRGERHLLYLSLIDQDGKILRQESLNLIKNDQNFKAINYQEKLHKKEIERDQARKSWGSIENIKELKEGYLSQVVHTISKLMVEHNAIVVLEDLNFGFKRGRQKVERQVYQKFEKMLIEKLNFLVFKDKEMDEPGGILKAYQLTDNFVSFEKMGKQTGFVFYVPAWNTSKIDPKTGFVNFLHLNYENVNQAKELIGKFDQIRYNQDRDWFEFQVTTDQFFTKENAPDTRTWIICSTPTKRFYSKRTVNGSVSTIEIDVNQKLKELFNDCNYQDGEDLVDRILEKDSKDFFSKLIAYLRILTSLRQNNGEQGFEERDFILSPVVGSDGKFFNSLDASSQEPKDADANGAYHIALKGLMNLHVINETDDESLGKPSWKISNKDWLNFVWQRPSLKA

SEQ ID NO: 22 - protein, 1261 aa, Moraxella bovis
MLFQEFTHLYPLSKTVRFELKPIGKTLEHIHAKNFLSQDETMADMYQKVKAMLDDYHRDFIADMMGEVKLTKLAEFYDVYLKFRKNPKDDGLQKQLKDLQAVLRKEIVKPIGNGGKYKAGYDRLFGAKLFKDGKKLGDLAKFVIAQEGDSSPKLAHLAHFEKFSTYFTGFHDNRKNMYSDEDKHTSIAYRLIHENLPRFIDNLQILTTIKQKHSALYDQIINELTASGLDVSLASHLDGYHKLLTQEGITAYNTLLGGISGEAGSRKIKGINELINSHHNQHCHKSERIAKLRPLHKQILSDGMGVSFLPSKFADDSEVCQAVNEFYRHYADVFAKVQSLFDGFDDYQKDGIYVEHKNLNELSKQAFGDFALLGRVLDGYYVDVVSPEFNERFAKAKTDNAKEKLTKEKDKFIKGVHSLASLEQAIEHYTARHDDESVQAGKLGQYFKHGLAGVDNPIQKIHNNHSTIKGFLERERPAGERALPKIQLGKNPEIRQLKELLDNTLNVVHFAKLLTTKTTLDNQDGNFYGEFGALYDELAKIPTLYNKVRDYLSQKPFSTEKYKLNFGNPTLLNGWDLNKEKDNFGVILQKDGCYYLALLDKAHKKVFDNAPNTGKNIYQKMIYKLLPGPNKMLPKVFFAKSNLDYYNPSAELLDKYAKGTHKKGDNFNLKDCHALIDFFKAGINKHPEWQHFGFKFSPTSSYQDLSDFYREVEPQGYQVKFVDINADYIDELVEQGQLYLFQIYNKDFSPKAHGKPNLHTLYFKALFSEDNLADPIYKLNGEAQIFYRQASLDMNETTIHRAGEVLENKNPDNPKKRQFVYDIIKDKRYTQDKFMLHVPITMNFGVQGMTIKEFNKKVNESIQQYDEVNVIGIDRGERHLLYLTVINSKGEILEQRSLNDIITTSANGTQMTTHYHKILDKREIERLNARVGWGEIETIKELKSGYLSHVVHQISQLMLKYNAIVVLEDLNFGFKRGRFKVEKQIYQNFENALIKKLNHLVLKDKADDEIGSYKNALQLTNNFTDLKSIGKQTGFLFYVPAWNTSKIDPETGFVDLLKPRYENIAQSQAFFGKFDKICYNADKGYFEFHIDYAKFTDKAKNSRQKWTICSHGDKRYVYDKTANKNKGTTKGINVNDELKSLFARHHINEKQPNLVMDICQNNDKEFHKSLMYLLKTLLALRYSNASSDEDFILSPVANDEGVFFNSALADDTQPQNADANGAYHIALKGLWLLNELKDSDDLNKVKLAIDNQTWLNFAQNR

SEQ ID NO: 23 - protein, 1068 aa, Eubacterium rectale
MNNGTNNFQNFIGISSLQKTLRNALIPTETTQQFIVKNGIIKEDELRGENRQILKDIMDDYYRGFISETLSSIDDIDWTSLFEKMEIQLKNGDNKDTLIKEQAEKRKAIYKKFANDDRFKNMFSAKLISDILPEFVIHNNNYSASEKEEKTQVIKLFSRFATSFKDYFKNRANCFSADDISSSSCHRIVNDNAEIFFSNALVYRRIVKNLSNDDINKISGDMKDSLKEMSLEEIYSYEKYGEFITQEGISFYNDICGKVNSFMNLYCQKNKENKNLYKLRKLHKQILCIADTSYEVPYKFESDEEVYQSVNGFLDNISSKHIVERLRKIGDNYNGYNLDKIYIVSKFYESVSQKTYRDWETINTALEIHYNNILPGNGKSKADKVKKAVKNDLQKSITEINELVSNYKLCPDDNIKAETYIHEISHILNNFEAQELKYNPEIHLVESELKASELKNVLDIIMNAFHWCSVFMTEELVDKDNNFYAELEEIYDEIYPVISLYNLVRNYVTQKPYSTKKIKLNFGIPTLADGWSKSKEYSNNAIILMRDNLYYLGIFNAKNKPDKKIIEGNTSENKGDYKKMIYNLLPGPNKMIPWVFLSSKKGVETYKPSAYILEGYKQNKHLKSSKDFDITFCHDLIDYFKNCIAIHPEWKNFGFEFSDTSTYEDISGFYREVELQGYKIDWTYISEKDIELLQEKGQLYLFQIYNKDFSKKSTGNDNLHTMYLKNLFSEENLKDIVLKLNGEAEIFFRKSSIKNPIIHKKGSILVNRTYEAEEKDQFGNIQIVRKTIPENIYQELYKYFNDKSDKELSDEATKLKNVVGHHEAATNIVKDYRYTYDKYFLHMPITINFKANKTSFINDRILQYIAKEKDLHVIGIDRGERNLIYVSVIDTCGNIVEQKSFNIVNGYDYQIKLKQQEGARQIARKEWKEIGRIKEIKEGYLSLVIHEISKMVIKYNAIIAMEDLSYGFKKGRFKVERQVYQKFETMLINKLNYLVFKDISITENGGLLKGYQLTYIPEKLKNVGHQCGCIFYVPAAYTSKIDPTTGFVNIFKFKDLTVDAKREFIKKI

SEQ ID NO: 24 - protein, 1309 aa, unidentified
  REGION 1..1309: note = Sequence from GenBank assembly GCA_003491785.1
INNMAKNFEDFKRLYPLSKTLRFEAKPIGATLDNIVKSGLLEEDEHRAASYVKVKKLIDEYHKVFIDRVLDNGCLPLDDKGDNNSLAEYYESYVSKAQDEDAIKKFKEIQQNLLSIIAKKLTDDKAYANLFGNKLIESYKDKADKTKLIDSDLIQFINTAESTQLVSMSQDEAKELVKEFWGFTTYFEGFFKNRKNMYTPEEKSTGIAYRLINENLPKFIDNMEAFKKAIARPEIQANMEELYSNFSEYLNVESIQEMFLLDYYNMLLTQKQIDVYNAIIGGKTDDEHDVKIKGINEYINLYNQQHKDDKLPKLKALFKQILSDRNAISWLPEEFNSDQEVLNAIKDCYERLAENVLGDKVLKSLLGSLADYSLDGIFIRNDLQLTDISQKMFGNWGVIQNAIMQNIKHVAPARKHKESEEDYEKRIAGIFKKADSFSISYINDCLNEADPNNAYFVENYFATFGAVNTPTMQRENLFALVQNAYTEVAALLHSDYPTVKHLAQDKANVSKIKALLDAIKSLQHFVKPLLGKGDESDKDERFYGELASLWAELDTVTPLYNMIRNYMTRKPYSQKKIKLNFENPQLLGGWDANKEKDYATIILRRNGLYYLAIMDKDSRKLLGKAMPSDGECYEKMVYKFFKDVTTMIPKCSTQLKDVQAYFKVNTDDYVLNSKAFNRPLTITKEVFDLNNVLYGKYKKFQKGYLTATGDNVGYTHAVNVWIKFCMDFLDSYDSTCIYDFSSLKPESYLSLDSFYQDVNLLLYKLSFTDVSASFIDQLVEEGKMYLFQIYNKDFSEYSKGTPNMHTLYWKALFDERNLADVVYKLNGQAEMFYRKKSIENTHPTHPANHPILNKNKDNKKKESLFEYDLIKDRRYTVDKFMFHVPITMNFKSSGSENINQDVKAYLRHADDMHIIGIDRGERHLLYLVVIDLQGNIKEQFSLNEIVNDYNGNTYHTNYHDLLDVREDERLKARQSWQTIENIKELKEGYLSQVIHKITQLMVRYHAIVVLEDLSKGFMRSRQKVEKQVYQKFEKMLIDKLNYLVDKKTDVSTPGGLLNAYQLTCKSDSSQKLGKQSGFLFYIPAWNTSKIDPVTGFVNLLDTHSLNSKEKIKAFFSKFDAIRYNKDKKWFEFNLDYDKFGKKAEDTRTKWTLCTRGMRIDTFRNKEKNSQWDNQEVDLTTEMKSLLEHYYIDIHGNLKDAISTQTDKAFFTGLLHILKLTLQMRNSITGTETDYLVSPVADENGIFYDSRSCGDQLPENADANGAYNIARKGLMLVEQIKDAEDLDNVKFDISNKAWLNFAQQKPYKNG

SEQ ID NO: 25 - protein, 1277 aa, Prevotella copri
INNMAKNFEDFKRLYSLSKTLRFEAKPIGATLDNIVKSDLLDEDEHRAASYVKVKKLIDEYHKVFIDRVLDDGCLPLENKGNNNSLAEYYESYVSRAQDEDAKKKFKEIQQNLRSVIAKKLTEDKAYANLFGNKLIESYKDKEDKKKIIDSDLIQFINTAESTQLDSMSQDEAKELVKEFWGFVTYFYGFFDNRKNMYTAEEKSTGIAYRLVNENLPKFIDNIEAFNRAITRPEIQENMGVLYSDFSEYLNVESIQEMFQLDYYNMLLTQKQIDVYNAIIGGKTDDEHDVKIKGINDYINLYNQKHKDDKLPKLKALFKQILSDRNAISWLPEEFNSDQEVLNAIKDCYERLSENVLGDKVLKSMLGSLADYSLDGIFIRNDLQLTDISQKMFGNWSVIQNAIMQNIKHVAPARKHKESEEEYENRIAGIFKKADSFSISYIDACLNETDPNNAYFVENYFATLGAVDTPTMQRENLFALVQNAYTEITALLHSDYPTEKNLAQDKANVAKIKALLDAIKSLQHFVKPLLGKGDESDKDERFYGELASLWAELDTMTPLYNMIRNYMTRKPYSQKKIKLNFENPQLLGGWDANKEKDYATIILRRNGLYYLAIMNKDSKKLLGKAMPSDGECYEKMVYKLLPGANKMLPKVFFAKSRMEDFKPSKELVEKYYNGTHKKGKNFNIQDCHNLIDYFKQSIDKHEDWSKFGFKFSDTSTYEDLSGFYREVEQQGYKLSFARVSVSYINQLVEEGKMYLFQIYNKDFSEYSKGTPNMHTLYWKALFDERNLADVVYKLNGQAEMFYRKKSIENTHPTHPANHPILNKNKDNKKKESLFGYDLIKDRRYTVDKFLFHVPITMNFKSSGSENINQDVKAYLRHADDMHIIGIDRGERHLLYLVVIDLQGNIKEQFSLNEIVNDYNGNTYHTNYHDLLDVREDERLKARQSWQTIENIKELKEGYLSQVIHKITQLMVKYHAIVVLEDLNMGFMRGRQKVEKQVYQKFEKMLIEKLNYLVDKKADASVSGGLLNAYQLTSKFDSFQKLGKQSGFLFYIPAWNTSKIDPVTGFVNLLDTRYQNVEKAKSFFSKFDAIRYNKDKEWFEFNLDYDKFGKKAEGTRTKWTLCTRGMRIDTFRNKEKNSQWDNQEVDLTAEMKSLLEHYYIDIHSNLKDAISAQTDKAFFTGLLHILKLTLQMRNSITGTETDYLVSPVVDENGIFYDSRSCGDELPENADANGAYNIARKGLMMIEQIKDAKDLDNLKFDISNKAWLNFAQQKPYKNG

SEQ ID NO: 26 - protein, 594 aa, Francisella philomiragia
EFNIEDCRKFIDFYKHSISRHPEWKDFGFRFSDTKKYNSIDEFYREVENQGYKLTFENISESYIDSLVDEGKLYLFQIYNKDFSVYSKGKPNLHTLYWKALFDERNLQDVVYKLNGEAELFYRKQSIPKKITHPAKQAIANKNKDNPKKESFFEYDLIKDKRFTEDKFFFHCPITMNFKSSGANKFNDEVNLLLKEKANDVHILSIDRGERHLAYYTLVDSKGNIIKQDTFNIIGNDRMKTNYHDKLAAIEKDRESARKDWKKINNIKEMKEGYLSQVVHEIAKLVIEYNAIVVFEDLNFGFKRGRFKVEKQVYQKLEKMLIEKLNYLVFKDNEFDKAGGVLRAYQLTAPFETFKKMGKQTGVIYYVPAGFTSKICPVTGFVNQLYPKYESVSKSQEFFSKFDKICYNLDKGYFEFSFDYKNFGDKAAKGKWTIASFGSRLINFRNSDKNHNWDTREVYPTKELEKLLKDYSIEYGHGECIKAAICGESDKKFFAKLTSILNSILQMRNSKTGTELDYLISPVADVNGNFFDSRHAPKNMPQDADANGAYHIGLKGLMLLYRIKNNQDGKKLNLVIKNEEYFEFVQNRNKSSKI

SEQ ID NO: 27 - protein, 1300 aa, Francisella tularensis; identical to SEQ ID NO: 6

SEQ ID NO: 28 - protein, 1307 aa, Francisella tularensis
MSIYQEFVNKYSLSKTLRFELIPQGKTLENIKARGLILDDEKRAKDYKKAKQIIDKYHQFFIEEILSSVCISEDLLQNYSDVYFKLKKSDDDNLQKDFKSAKDTIKKQISKYINDSEKFKNLFNQNLIDAKKGQESDLILWLKQSKDNGIELFKANSDITDIDEALEIIKSFKGWTTYFKGFHENRKNVYSSNDIPTSIIYRIVDDNLPKFLENKAKYESLKDKAPEAINYEQIKKDLAEELTFDIDYKTSEVNQRVFSLDEVFEIANFNNYLNQSGITKFNTIIGGKFVNGENTKRKGINEYINLYSQQINDKTLKKYKMSVLFKQILSDTESKSFVIDKLEDDSDVVTTMQSFYEQIAAFKTVEEKSIKETLSLLFDDLKAQKLDLSKIYFKNDKSLTDLSQQVFDDYSVIGTAVLEYITQQVAPKNLDNPSKKEQDLIAKKTEKAKYLSLETIKLALEEFNKHRDIDKQCRFEEILSNFAAIPMIFDEIAQNKDNLAQISIKYQNQGKKDLLQASAEEDVKAIKDLLDQTNNLLHRLKIFHISQSEDKANILDKDEHFYLVFEECYFELANIVPLYNKIRNYITQKPYSDEKFKLNFENSTLASGWDKNKESANTAILFIKDDKYYLGIMDKKHNKIFSDKAIEENKGEGYKKIVYKQIADASKDIQNLMIIDGKTVCKKGRKDRNGVNRQLLSLKRKHLPENIYRIKETKSYLKNEARFSRKDLYDFIDYYKDRLDYYDFEFELKPSNEYSDFNDFTNHIGSQGYKLTFENISQDYINSLVNEGKLYLFQIYSKDFSAYSKGRPNLHTLYWKALFDERNLQDVVYKLNGEAELFYRKQSIPKKITHPAKETIANKNKDNPKKESVFEYDLIKDKRFTEDKFFFHCPITINFKSSGANKFNDEINLLLKEKANDVHILSIDRGERHLAYYTLVDGKGNIIKQDNFNIIGNDRMKTNYHDKLAAIEKDRDSARKDWKKINNIKEMKEGYLSQVVHEIAKLVIEYNAIVVFEDLNFGFKRGRFKVEKQVYQKLEKMLIEKLNYLVFKDNEFDKTGGVLRAYQLTAPFETFKKMGKQTGIIYYVPAGFTSKICPVTGFVNQLYPKYESVSKSQEFFSKFDKICYNLDKGYFEFSFDYKNFGDKAAKGKWTIASFGSRLINFRNSDKNHNWDTREVYPTKELEKLLKDYSIEYGHGECIKAAICGESDKKFFAKLTSVLNTILQMRNSKTGTELDYLISPVADVNGNFFDSRQAPKNMPQDADANGAYHIGLKGLMLLDRIKNNQEGKKLNLVIKNEEYFEFVQNRNN

SEQ ID NO: 29 - protein, 1300 aa, Francisella tularensis; identical to SEQ ID NO: 4

SEQ ID NO: 30 - protein, 1262 aa, unidentified
  REGION 1..1262: note = Sequence from GenBank assembly GCA_000163695.1
MRKFNEFVGLYPISKTLRFELKPIGKTLEHIQRNKLLEHDAVRADDYVKVKKIIDKYHKCLIDEALSGFTFDTEADGRSNNSLSEYYLYYNLKKRNEQEQKTFKTIQNNLRKQIVNKLTQSEKYKRIDKKELITTDLPDFLTNESEKELVEKFKNFTTYFTEFHKNRKNMYSKEEKSTAIAFRLINENLPKFVDNIAAFEKVVSSPLAEKINALYEDFKEYLNVEEISRVFRLDYYDELLTQKQIDLYNAIVGGRTEEDNKIQIKGLNQYINEYNQQQTDRSNRLPKLKPLYKQILSDRESVSWLPPKFDSDKNLLIKIKECYDALSEKEKVFDKLESILKSLSTYDLSKIYISNDSQLSYISQKMFGRWDIISKAIREDCAKRNPQKSRESLEKFAERIDKKLKTIDSISIGDVDECLAQLGETYVKRVEDYFVAMGESEIDDEQTDTTSFKKNIEGAYESVKELLNNADNITDNNLMQDKGNVEKIKTLLDAIKDLQRFIKPLLGKGDEADKDGVFYGEFTSLWTKLDQVTPLYNMVRNYLTSKPYSTKKIKLNFENSTLMDGWDLNKEPDNTTVIFCKDGLYYLGIMGKKYNRVFVDREDLPHDGECYDKMEYKLLPGANKMLPKVFFSETGIQRFLPSEELLGKYERGTHKKGAGFDLGDCRALIDFFKKSIERHDDWKKFDFKFSDTSTYQDISEFYREVEQQGYKMSFRKVSVDYIKSLVEEGKLYLFQIYNKDFSAHSKGTPNMHTLYWKMLFDEENLKDVVYKLNGEAEVFFRKSSITVQSPTHPANSPIKNKNKDNQKKESKFEYDLIKDRRYTVDKFLFHVPITMNFKSVGGSNINQLVKRHIRSATDLHIIGIDRGERHLLYLTVIDSRGNIKEQFSLNEIVNEYNGNTYRTDYHELLDTREGERTEARRNWQTIQNIRELKEGYLSQVIHKISELAIKYNAVIVLEDLNFGFMRSRQKVEKQVYQKFEKMLIDKLNYLVDKKKPVAETGGLLRAYQLTGEFESFKTLGKQSGILFYVPAWNTSKIDPVTGFVNLFDTHYENIEKAKVFFDKFKSIRYNSDKDWFEFVVDDYTRFSPKAEGTRRDWTICTQGKRIQICRNHQRNNEWEGQEIDLTKAFKEHFEAYGVDISKDLREQINTQNKKEFFEELLRLLRLTLQMRNSMPSSDIDYLISPVANDTGCFFDSRKQAELKENAVLPMNADANGAYNIARKGLLAIRKMKQEENDSAKISLAISNKEWLKFAQTKPYLED

SEQ ID NO: 31 - protein, 1300 aa, Francisella sp.
MSIYQEFVNKYSLSKTLRFELIPQGKTLENIKARGLILDDEKRAKDYKKAKQIIDKYHQFFIEEILSSVCISEDLLQNYSDVYFKLKKSDDDNLQKDFKSAKDTIKKQISEYIKDSEKFKNLFNQNLIDAKKGQESDLILWLKQSKDNGIELFKANSDITDIDEALEIIKSFKGWTTYFKGFHENRKNVYSSNDIPTSIIYRIVDDNLPKFLENKAKYESLKDKAPEAINYEQIKKDLAEELTFDIDYKTSEVNQRVFSLDEVFEIANFNNYLNQSGITKFNTIIGGKFVNGENTKRKGINEYINLYSQQINDKTLKKYKMSVLFKQILSDTESKSFVIDKLEDDSDVVTTMQSFYEQIAAFKTVEEKSIKETLSLLFDDLKAQKLDLSKIYFKNDKSLTDLSQQVFDDYSVIGTAVLEYITQQVAPKNLDNPSKKEQDLIAKKTEKAKYLSLETIKLALEEFNKHRDIDKQCRFEEILANFAAIPMIFDEIAQNKDNLAQISIKYQNQGKKDLLQASAEDDVKAIKDLLDQTNNLLHRLKIFHISQSEDKANILDKDEHFYLVFEECYFELANIVPLYNKIRNYITQKPYSDEKFKLNFENSTLANGWDKNKEPDNTAILFIKDDKYYLGVMNKKNNKIFDDKAIKENKGEGYKKIVYKLLPGANKMLPKVFFSAKSIKFYNPSEDILRIRNHSTHTKNGNPQKGYEKFEFNIEDCRKFIDFYKESISKHPEWKDFGFRFSDTQRYNSIDEFYREVENQGYKLTFENISESYIDSVVNQGKLYLFQIYNKDFSAYSKGRPNLHTLYWKALFDERNLQDVVYKLNGEAELFYRKKSIPKKITHPAKEAIANKNKDNPKKESFFEYDLIKDKRFTEDKFFFHCPITINFKSSGANKFNDEINLLLKEKANDVHILSIDRGERHLAYYTLVDGKGNIIKQDTFNIIGNDRMKTNYHDKLAAIEKDRDSARKDWKKINNIKEMKEGYLSQVVHEIAKLVIEHNAIVVFEDLNFGFKRGRFKVEKQVYQKLEKMLIEKLNYLVFKDNEFDKTGGVLRAYQLTAPFETFKKMGKQTGIIYYVPAGFTSKICPVTGFVNQLYPKYESVSKSQEFFSKFDKICYNLDKGYFEFSFDYKNFGDKAAKGKWTIASFGSRLINFRNSDKNHNWDTREVYPTKELEKLLKDYSIEYGHGECIKAAICGESDKKFFAKLTSILNTILQMRNSKTGTELDYLISPVADVNGNFFDSRQAPKNMPQDADANGAYHIGLKGLMLLDRIKNNQEGKKLNLVIKNEEYFEFVQNRNN

SEQ ID NO: 32 - protein, 1022 aa, Eubacterium rectale
FNHFVSQDDISFYNYVVGGINKFMNLYCQATKEKLSPYKLRHLHKQILCIEESLYDVPAKFNCDEDVYAAVNDFLNNVRTKSVIERLQMLGKNADSYDLDKIYISKKHFTNISQTLYRDFSVINTALTMSYIDTLPGKGKTKEKKAASMAKNTELISLGEIDKLVDKYNLCPDKAVSTRSLIRIISDIVAGYKASPLTMSSGIPLAENETEIAVLKEAIEPFMDIFRWCAKFKTDEPVDKDTDFYTELEDISDEIHSIVSLYNRTRNYVTKKPYNTDKFELYFGTSSFASGWSESKEFTNNAILLAKDDKFYLGVFNAKNKPAKSIIKGHDTMQNGDYKKMVYSLLTGPNKMLPHMFISSSKAAPVYGLTDELLSDYKKGKHLKASKNFDIDYCHKLIDYFKHCLTLYTDWDCFDFKFSDTKSYNDIGEFYKEVAEQGYYMNWTYIGSDDIDSLQENGQLYLFQIYNKDFSEKSFGKPSKHTAILRSLFSDENVADPVIKLCGGTEAFFRPKSIKTPVVHKKGSVLVSKTYNAQEMDENGNIITVRKCVPDDVYMELYGYYNNSGTPLSAEALKYKDIVDHRTAPYDIIKDHRYTEDEFFINMPVSLNYKAENRRVNVNEMALKYIAQTKDTYIIGIDRGERNLLYVSVIDTDGNIVEQKSLNIINNVDYQAKLKQVEIMRKLARQNWKQGVKIADLKKGYLSQAVHEVAELVIKYNGIVVMEDLNSRFKEKRSKIERGVYQQFETSLIKTLNYLTFKDRKPLEAGGIANGYQLTYIPESLKNVGSQCGCILYVPAAYTSRVDPTTGFVSLFKFRDISSEKVKTDFIGRFDCIRYDAEKDLFAFEFDYDNFETYETCAKTKWCAYTYGTRVKKTFLNRKFVSEVIIDITEEIKKTLAATDINWTDGHDIKQEIIDYALSSHIFEMFKLTVQMRNSLCESKDREYDKFVSPIMNASGKFFDTDAADKSLPIEADANDAYGIAMKGLYNVLQVKNNWAESEKFKFKRLSNEDWFSFMQKRQSRQ

SEQ ID NO: 33 - protein, 886 aa, unidentified
  REGION 1..886: note = Sequence from GenBank assembly GCA_000222855.1
INEQINLAIQKDSTLKDLLRKNHALKMTLLFKQILSEKESKFIADEFPNDEKAINNSKDDYYNFLKDDGVVSTLRKIFSNLKTYDNYQISKIFVKGSNITKLSTTLFGGENWFKITEAIDSALQSKDKNYIKQKKNSNGEIEDVISKREFSLEDLNSYLNLSGNGELEVDSKLDIVQMLSDKVEQKFNEWFKSTEITWPISLKTDNDKKNIKEILDSLMNFYNLCSLLETGSLEKEPNFYSDYDSCMKDFKDIKALYNKVRNYCTKKPYSYDKFKLNFNCVQLASGWSDSKLNDYLSTIFVKNGEFFLGILNKTNRPNFKVNIVDGNKNCYQKIKYLFFKDFSKMLPKCSTQLKEVVAHFKETKNTEIILSDTKKFKTPLHISREIFELNNPKDGEVKKFSSEYAKNGDAKVYKESLAKWIDFAKTFLFSYLGTIDFDYSGLKNTSEYNSLVEFYNDVDSISYKIDFENIDENYINDCVEQGKLFLFKIHNKDFKTESKGTKNLHTLYFLNIFSPENAKVGTIKLNGEAELFYRKSSIKKENVITHKKGSKLVNRTYFDKNSQKLETLTEEAYQAIYKHLNNKVPYPEQYKEFLEKVEKKVEIKEANHDITKDKRFTENKFFFHCPITLNYKDTSVPVKFNHKVLNFLRENKDVNIIGIDRGERNLIYVSIINQQGKILEQRSFNTIIEKVANKEISKEIDYHQKLSQREGKRKEARKNWSTIGNIKNLKEGYLSSVVHEIAKLVIDYNAIVVMENLNSGFKRIRQGISEKSVYQKFESMLIEKLNYLSFKSRKADDIGGVLKGYQLTNKFDTFNKLGLQSGILFYVNPKYTSKIDPTTGFANTLVLKDLTNAEDYKKFFDLFDCIKYEPNLNLFKFSLDFFTRRY

SEQ ID NO: 34 - protein, 1318 aa, Flavobacterium branchiophilum
MTNKFTNQYSLSKTLRFELIPQGKTLEFIQEKGLLSQDKQRAESYQEMKKTIDKFHKYFIDLALSNAKLTHLETYLELYNKSAETKKEQKFKDDLKKVQDNLRKEIVKSFSDGDAKSIFAILDKKELITVELEKWFENNEQKDIYFDEKFKTFTTYFTGFHQNRKNMYSVEPNSTAIAYRLIHENLPKFLENAKAFEKIKQVESLQVNFRELMGEFGDEGLIFVNELEEMFQINYYNDVLSQNGITIYNSIISGFTKNDIKYKGLNEYINNYNQTKDKKDRLPKLKQLYKQILSDRISLSFLPDAFTDGKQVLKAIFDFYKINLLSYTIEGQEESQNLLLLIRQTIENLSSFDTQKIYLKNDTHLTTISQQVFGDFSVFSTALNYWYETKVNPKFETEYSKANEKKREILDKAKAVFTKQDYFSIAFLQEVLSEYILTLDHTSDIVKKHSSNCIADYFKNHFVAKKENETDKTFDFIANITAKYQCIQGILENADQYEDELKQDQKLIDNLKFFLDAILELLHFIKPLHLKSESITEKDTAFYDVFENYYEALSLLTPLYNMVRNYVTQKPYSTEKIKLNFENAQLLNGWDANKEGDYLTTILKKDGNYFLAIMDKKHNKAFQKFPEGKENYEKMVYKLLPGVNKMLPKVFFSNKNIAYFNPSKELLENYKKETHKKGDTFNLEHCHTLIDFFKDSLNKHEDWKYFDFQFSETKSYQDLSGFYREVEHQGYKINFKNIDSEYIDGLVNEGKLFLFQIYSKDFSPFSKGKPNMHTLYWKALFEEQNLQNVIYKLNGQAEIFFRKASIKPKNIILHKKKIKIAKKHFIDKKTKTSEIVPVQTIKNLNMYYQGKISEKELTQDDLRYIDNFSIFNEKNKTIDIIKDKRFTVDKFQFHVPITMNFKATGGSYINQTVLEYLQNNPEVKIIGLDRGERHLVYLTLIDQQGNILKQESLNTITDSKISTPYHKLLDNKENERDLARKNWGTVENIKELKEGYISQVVHKIATLMLEENAIVVMEDLNFGFKRGRFKVEKQIYQKLEKMLIDKLNYLVLKDKQPQELGGLYNALQLTNKFESFQKMGKQSGFLFYVPAWNTSKIDPTTGFVNYFYTKYENVDKAKAFFEKFEAIRFNAEKKYFEFEVKKYSDFNPKAEGTQQAWTICTYGERIETKRQKDQNNKFVSTPINLTEKIEDFLGKNQIVYGDGNCIKSQIASKDDKAFFETLLYWFKMTLQMRNSETRTDIDYLISPVMNDNGTFYNSRDYEKLENPTLPKDADANGAYHIAKKGLMLLNKIDQADLTKKVDLSISNRDWLQFVQKNK

SEQ ID NO: 35 - protein, 1231 aa, Butyrivibrio fibrisolvens
MYYESLTKLYPIKKTIRNELVPIGKTLENIKKNNILEADEDRKIAYIRVKAIMDDYHKRLINEALSGFALIDLDKAANLYLSRSKSADDIESFSRFQDKLRKAIAKRLREHENFGKIGNKDIIPLLQKLSENEDDYNALESFKNFYTYFESYNDVRLNLYSDKEKSSTVAYRLINENLPRFLDNIRAYDAVQKAGITSEELSSEAQDGLFLVNTFNNVLIQDGINTYNEDIGKLNVAINLYNQKNASVQGFRKVPKMKVLYKQILSDREESFIDEFESDTELLDSLESHYANLAKYFGSNKVQLLFTALRESKGVNVYVKNDIAKTSFSNVVFGSWSRIDELINGEYDDNNNRKKDEKYYDKRQKELKKNKSYTIEKIITLSTEDVDVIGKYIEKLESDIDDIRFKGKNFYEAVLCGHDRSKKLSKNKGAVEAIKGYLDSVKDFERDLKLINGSGQELEKNLVVYGEQEAVLSELSGIDSLYNMTRNYLTKKPFSTEKIKLNFNKPTFLDGWDYGNEEAYLGFFMIKEGNYFLAVMDANWNKEFRNIPSVDKSDCYKKVIYKQISSPEKSIQNLMVIDGKTVKKNGRKEKEGIHSGENLILEELKNTYLPKKINDIRKRRSYLNGDTFSKKDLTEFIGYYKQRVIEYYNGYSFYFKSDDDYASFKEFQEDVGRQAYQISYVDVPVSFVDDLINSGKLYLFRVYNKDFSEYSKGRLNLHTLYFKMLFDERNLKNVVYKLNGQAEVFYRPSSIKKEELIVHRAGEEIKNKNPKRAAQKPTRRLDYDIVKDRRYSQDKFMLHTSIIMNFGAEENVSFNDIVNGVLRNEDKVNVIGIDRGERNLLYVVVIDPEGKILEQRSLNCITDSNLDIETDYHRLLDEKESDRKIARRDWTTIENIKELKAGYLSQVVHIVAELVLKYNAIICLEDLNFGFKRGRQKVEKQVYQKFEKMLIDKLNYLVMDKSREQLSPEKISGALNALQLTPDFKSFKVLGKQTGIIYYVPAYLTSKIDPMTGFANLFYVKYENVDKAKEFFSKFDSIKYNKDGKNWNTKGYFEFAFDYKKFTDRAYGRVSEWTVCTVGERIIKFKNKEKNNSYDDKVIDLTNSLKELFDSYKVTYESEVDLKDAILAIDDPAFYRDLTRRLQQTLQMRNSSCDGSRDYIISPVKNSKGEFFCSDNNDDTTPNDADANGAFNIARKGLWVLNEIRNSEEGSKINLAMSNAQWLEYAQDNTI

SEQ ID NO: 36 - protein, 1265 aa, Prevotella brevis
SMKQFTNLYQLSKTLRFELKPIGKTLEHINANGFIDNDAHRAESYKKVKKLIDDYHKDYIENVLNNFKLNGEYLQAYFDLYSQDTKDKQFKDIQDKLRKSIASALKGDDRYKTIDKKELIRQDMKTFLKKDTDKALLDEFYEFTTYFTGYHENRKNMYSDEAKSTAIAYRLIHDNLPKFIDNIAVFKKIANTSVADNFSTIYKNFEEYLNVNSIDEIFSLDYYNIVLTQTQIEVYNSIIGGRTLEDDTKIQGINEFVNLYNQQLANKKDRLPKLKPLFKQILSDRVQLSWLQEEFNTGADVLNAVKEYCTSYFDNVEESVKVLLTGISDYDLSKIYITNDLALTDVSQRMFGEWSIIPNAIEQRLRSDNPKKTNEKEEKYSDRISKLKKLPKSYSLGYINECISELNGIDIADYYATLGAINTESKQEPSIPTSIQVHYNALKPILDTDYPREKNLSQDKLTVMQLKDLLDDFKALQHFIKPLLGNGDEAEKDEKFYGELMQLWEVIDSITPLYNKVRNYCTRKPFSTEKIKVNFENAQLLDGWDENKESTNASIILRKNGMYYLGIMKKEYRNILTKPMPSDGDCYDKVVYKFFKDITTMVPKCTTQMKSVKEHFSNSNDDYTLFEKDKFIAPVVITKEIFDLNNVLYNGVKKFQIGYLNNTGDSFGYNHAVEIWKSFCLKFLKAYKSTSIYDFSSIEKNIGCYNDLNSFYGAVNLLLYNLTYRKVSVDYIHQLVDEDKMYLFMIYNKDFSTYSKGTPNMHTLYWKMLFDESNLNDVVYKLNGQAEVFYRKKSITYQHPTHPANKPIDNKNVNNPKKQSNFEYDLIKDKRYTVDKFMFHVPITLNFKGMGNGDINMQVREYIKTTDDLHFIGIDRGERHLLYICVINGKGEIVEQYSLNEIVNNYKGTEYKTDYHTLLSERDKKRKEERSSWQTIEGIKELKSGYLSQVIHKITQLMIKYNAIVLLEDLNMGFKRGRQKVESSVYQQFEKALIDKLNYLVDKNKDANEIGGLLHAYQLTNDPKLPNKNSKQSGFLFYVPAWNTSKIDPVTGFVNLLDTRYENVAKAQAFFKKFDSIRYNKEYDRFEFKFDYSNFTAKAEDTRTQWTLCTYGTRIETFRNAEKNSNWDSREIDLTTEWKTLFTQHNIPLNANLKEAILLQANKNFYTDILHLMKLTLQMRNSVTGTDIDYMVSPVANECGEFFDSRKVKEGLPVNADANGAYNIARKGLWLAQQIKNANDLSDVKLAITNKEWLQFAQKKQYLKD

SEQ ID NO: 37 - protein, 594 aa, Francisella philomiragia; identical to SEQ ID NO: 26

SEQ ID NO: 38 - protein, 594 aa, Francisella philomiragia; identical to SEQ ID NO: 26

SEQ ID NO: 39 - protein, 1300 aa, Francisella tularensis; identical to SEQ ID NO: 4

SEQ ID NO: 40 - protein, 1300 aa, Francisella tularensis; identical to SEQ ID NO: 6

SEQ ID NO: 41 - protein, 999 aa, Sneathia sp.
INLLINEVNQKYKSKLNVFNSLYKQILTEEDTKSFVDEILLTPESVIKTIDNFIDSIIMNDIEGLKEEFLKISLENFEGIYISNKKLNEISNRKFGDYNSINMMIKQSMNEKGILSKKEINELIPDLENINKPKVKSFNLSFIFENLTKEHKELIIDYIRENICNVIENVKITIEKYRNIDNKIEFKNNAEKVSKIKEMLESINELCKLIKEFNTDEIEKNNEFYNILNKNFEIFESSYKVLNKVRNFVTKKEVIENKMKLNFSNYQLGNGWHKNKEKDCSIILFRKRNNERWIYYLGILKHGTKIKENDYLSSVDTGFYKMDYYAQNSLSKMIPKCSITVKNVKNAPEDESVILNDSKKFNEPLEITPEIRKLYGNNEHIKGDKFKKESLVKWIDFCKEFLLKYKSFEKAKKEILKLKESNLYENLEEFYSDAEEKAYFLEFINIDEDKIKKLVKEKNLYLFQIYNKDFSAYSTGNKNLHTMYFEELFTDENLKKPVFKLNGNTEVFYRIASSKPKIVHNKGEKLVNKTYLDDGIIKTIPDSVYEEISEKVKNNEDYSKLLEENNIKNLEIKVATHEIVKDKRYFENKFLFYLPITLNKKVSNKNTNKNINKNVIDEIKDCNEYNVIGIDRGERNLISLCIINQNGEIILQKEMNIIQSSDKYNVDYNEKLEIKSKERDNAKKNWSEIGKIKDLKSGYLSAVVHEIVKLAIEYNAVIILEDLNNGFKNSRKKVDKQIYQKFERALIEKLQFLIFKNYDKNEKGGLRNAFQLTPELKNITKVASQQGIIIYTNPAYTSKIDPTTGYANIIKKSNNNEESIVKAIDKISYDKEKDMFYFDINLSNSSFNLTVKNVLKKEWRIYTNGERIIYKDRKYITLNITQEMKDILSKCGIDYLNIDNLKQDILKNKLHKKVYYIFELANKMRNENKDVDYIISPVLNKDGKFFMTQEINELTPKDADLNGAYNIALKGKLMIDNLNKKEKFVFLSNEDWLNFIQGR

SEQ ID NO: 42 - protein, 1261 aa, Moraxella bovoculi
MLFQDFTHLYPLSKTVRFELKPIGKTLEHIHAKNFLNQDETMADMYQKVKAILDDYHRDFIADMMGEVKLTKLAEFYDVYLKFRKNPKDDGLQKQLKDLQAVLRKEIVKPIGNGGKYKAGYDRLFGAKLFKDGKELGDLAKFVIAQEGESSPKLAHLAHFEKFSTYFTGFHDNRKNMYSDEDKHTAIAYRLIHENLPRFIDNLQILATIKQKHSALYDQIINELTASGLDVSLASHLDGYHKLLTQEGITAYNTLLGGISGEAGSRKIQGINELINSHHNQHCHKSERIAKLRPLHKQILSDGMGVSFLPSKFADDSEVCQAVNEFYRHYADVFAKVQSLFDGFDDYQKDGIYVEYKNLNELSKQAFGDFALLGRVLDGYYVDVVNPEFNERFAKAKTDNAKAKLTKEKDKFIKGVHSLASLEQAIEHYTARHDDESVQAGKLGQYFKHGLAGVDNPIQKIHNNHSTIKGFLERERPAGERALPKIKSDKSPEIRQLKELLDNALNVAHFAKLLTTKTTLHNQDGNFYGEFGALYDELAKIATLYNKVRDYLSQKPFSTEKYKLNFGNPTLLNGWDLNKEKDNFGVILQKDGCYYLALLDKAHKKVFDNAPNTGKSVYQKMIYKLLPGPNKMLPKVFFAKSNLDYYNPSAELLDKYAQGTHKKGDNFNLKDCHALIDFFKAGINKHPEWQHFGFKFSPTSSYQDLSDFYREVEPQGYQVKFVDINADYINELVEQGQLYLFQIYNKDFSPKAHGKPNLHTLYFKALFSEDNLVNPIYKLNGEAEIFYRKASLDMNETTIHRAGEVLENKNPDNPKKRQFVYDIIKDKRYTQDKFMLHVPITMNFGVQGMTIKEFNKKVNQSIQQYDEVNVIGIDRGERHLLYLTVINSKGEILEQRSLNDITTASANGTQMTTPYHKILDKREIERLNARVGWGEIETIKELKSGYLSHVVHQISQLMLKYNAIVVLEDLNFGFKRGCFKVEKQIYQNFENALIKKLNHLVLKDKADDEIGSYKNALQLTNNFTDLKSIGKQTGFLFYVPAWNTSKIDPETGFVDLLKPRYENIAQSQAFFGKFDKICYNADRGYFEFHIDYAKFNDKAKNSRQIWKICSHGDKRYVYDKTANQNKGATIGVNVNDELKSLFTRYHINDKQPNLVMDICQNNDKEFHKSLMYLLKTLLALRYSNASSDEDFILSPVANDEGVFFNSALADDTQPQNADANGAYHIALKGLWLLNELKNSDDLNKVKLAIDNQTWLNFAQNR

SEQ ID NO: 43 - protein, 1261 aa, Moraxella bovoculi
MLFQDFTHLYPLSKTVRFELKPIGKTLEHIHAKNFLNQDETMADMYQKVKAILDDYHRDFIADMMGEVKLTKLAEFYDVYLKFRKNPKDDGLQKQLKDLQAVLRKEIVKPIGNGGKYKAGYDRLFGAKLFKDGKELGDLAKFVIAQEGESSPKLAHLAHFEKFSTYFTGFHDNRKNMYSDEDKHTAIAYRLIHENLPRFIDNLQILATIKQKHSALYDQIINELTASGLDVSLASHLDGYHKLLTQEGITAYNTLLGGISGEAGSRKIQGINELINSHHNQHCHKSERIAKLRPLHKQILSDGMGVSFLPSKFADDSEVCQAVNEFYRHYADVFAKVQSLFDGFDDYQKDGIYVEYKNLNELSKQAFGDFALLGRVLDGYYVDVVNPEFNERFAKAKTDNAKAKLTKEKDKFIKGVHSLASLEQAIEHYTARHDDESVQAGKLGQYFKHGLAGVDNPIQKIHNNHSTIKGFLERERPAGERALPKIKSDKSPEIRQLKELLDNALNVAHFAKLLTTKTTLHNQDGNFYGEFGALYDELAKIATLYNKVRDYLSQKPFSTEKYKLNFGNPTLLNGWDLNKEKDNFGVILQKDGCYYLALLDKAHKKVFDNAPNTGKSVYQKMIYKLLPGPNKMLPKVFFAKSNLDYYNPSAELLDKYAQGTHKKGDNFNLKDCHALIDFFKAGINKHPEWQHFGFKFSPTSSYQDLSDFYREVEPQGYQVKFVDINADYINELVEQGQLYLFQIYNKDFSPKAHGKPNLHTLYFKALFSEDNLVNPIYKLNGEAEIFYRKASLDMNETTIHRAGEVLENKNPDNPKKRQFVYDIIKDKRYTQDKFMLHVPITMNFGVQGMTIKEFNKKVNQSIQQYDEVNVIGIDRGERHLLYLTVINSKGEILEQRSLNDITTASANGTQMTTPYHKILDKREIERLNARVGWGEIETIKELKSGYLSHVVHQISQLMLKYNAIVVLEDLNFGFKRGRFKVEKQIYQNFENALIKKLNHLVLKDKADDEIGSYKNALQLTNNFTDLKSIGKQTGFLFYVPAWNTSKIDPETGFVDLLKPRYENIAQSQAFFGKFDKICYNADRGYFEFHIDYAKFNDKAKNSRQIWKICSHGDKRYVYDKTANQNKGATIGVNVNDELKSLFTRYHINDKQPNLVMDICQNNDKEFHKSLMYLLKTLLALRYSNASSDEDFILSPVANDEGVFFNSALADDTQPQNADANGAYHIALKGLWLLNELKNSDDLNKVKLAIDNQTWLNFAQNR

SEQ ID NO: 44 - protein, 1261 aa, Moraxella bovoculi; identical to SEQ ID NO: 42

SEQ ID NO: 45 - protein, 1261 aa, Moraxella bovoculi; identical to SEQ ID NO: 43

SEQ ID NO: 46 - protein, 1251 aa, Moraxella bovoculi
MLFQDFTHLYPLSKTVRFELKPIGRTLEHIHAKNFLSQDETMADMYQKVKVILDDYHRDFIADMMGEVKLTKLAEFYDVYLKFRKNPKDDGLQKQLKDLQAVLRKESVKPIGSGGKYKTGYDRLFGAKLFKDGKELGDLAKFVIAQEGESSPKLAHLAHFEKFSTYFTGFHDNRKNMYSDEDKHTAIAYRLIHENLPRFIDNLQILTTIKQKHSALYDQIINELTASGLDVSLASHLDGYHKLLTQEGITAYNRIIGEVNGYTNKHNQICHKSERIAKLRPLHKQILSDGMGVSFLPSKFADDSEMCQAVNEFYRHYTDVFAKVQSLFDGFDDHQKDGIYVEHKNLNELSKQAFGDFALLGRVLDGYYVDVVNPEFNERFAKAKTDNAKAKLTKEKDKFIKGVHSLASLEQAIEHHTARHDDESVQAGKLGQYFKHGLAGVDNPIQKIHNNHSTIKGFLERERPAGERALPKIKSGKNPEMTQLRQLKELLDNALNVAHFAKLLTTKTTLDNQDGNFYGEFGVLYDELAKIPTLYNKVRDYLSQKPFSTEKYKLNFGNPTLLNGWDLNKEKDNFGVILQKDGCYYLALLDKAHKKVFDNAPNTGKNVYQKMVYKLLPGPNKMLPKVFFAKSNLDYYNPSAELLDKYAKGTHKKGDNFNLKDCHALIDFFKAGINKHPEWQHFGFKFSPTSSYRDLSDFYREVEPQGYQVKFVDINADYIDELVEQGKLYLFQIYNKDFSPKAHGKPNLHTLYFKALFSEDNLADPIYKLNGEAQIFYRKASLDMNETTIHRAGEVLENKNPDNPKKRQFVYDIIKDKRYTQDKFMLHVPITMNFGVQGMTIKEFNKKVNQSIQQYDEVNVIGIDRGERHLLYLTVINSKGEILEQRSLNDITTASANGTQVTTPYHKILDKREIERLNARVGWGEIETIKELKSGYLSHVVHQINQLMLKYNAIVVLEDLNFGFKRGRFKVEKQIYQNFENALIKKLNHLVLKDKADDEIGSYKNALQLTNNFTDLKSIGKQTGFLFYVPAWNTSKIDPETGFVDLLKPRYENIAQSQAFFGKFDKICYNTDKGYFEFHIDYAKFTDKAKNSRQKWAICSHGDKRYVYDKTANQNKGAAKGINVNDELKSLFARYHINDKQPNLVMDICQNNDKEFHKSLMCLLKTLLALRYSNASSDEDFILSPVANDEGVFFNSALADDTQPQNADANGAYHIALKGLWLLNELKNSDDLNKVKLAIDNQTWLNFAQNR

SEQ ID NO: 47 - protein, 584 aa, Moraxella bovoculi
MCKHEEWEESFEFSKKLQDIGCYVDVNELFTEIETRRLNYKISFCNINADYIDELVEQGKLYLFQIYNKDFSPKAHGKPNLHTLYFKALFSEDNLADPIYKLNGEAQIFYRKASLDVNETTIHRAGEVLENKNPDNPKKRQFVYDIIKDKRYTQDKFMLHVPITMNFGVQGMTIKEFNKKVNQSIQQYDEVNVIGIDRGERHLLYLTVINSKGEILEQRSLNDITTASANGTQMTTPYHKILDKREIERLNARVGWGEIETIKELKSGYLSHVVHQISQLMLKYNAIVVLEDLNFGFKRGRFKVEKQIYQNFENALIKKLNHLVLKDKADDEIGSYKNALQLTNNFTDLKNIGKQTGFLFYVPAWNTSKIDPETGFVDLLKPRYENIAQSQAFFGKFDKICYNADKDYFEFHIDYAKFTDKAKNSRQTWTICSHGDKRYVYDKTANQNKGATKGINVNDELKSLFARHHINDKQPNLVMDICQNNDKEFHKSLMYLLKTLLALRYSNASSDEDFILSPVANDGGVFFNSALADDTQPQNADANGAYHIALKGLWLLNELKDSDDLNKVKLAIDNQTWLNFAQNR

SEQ ID NO: 48 - protein, 1263 aa, Eubacterium rectale
MNNGTNNFQNFIGISSLQKTLRNALTPTETTQQFIVKNGIIKEDELRGENRQILKDIMDDYYRGFISETLSSIDDIDWTSLFEKMEIQLKNGDNKDTLIKEQAEKRKAIYKKFADDDRFKNMFSAKLISDILPEFVIHNNNYSASEKEEKTQVIKLFSRFATSFKDYFKNRANCFSADDISSSSCHRIVNDNAEIFFSNALVYRRIVKNLSNDDINKISGDMKDSLKKMSLEKIYSYEKYGEFITQEGISFYNDICGKVNSFMNLYCQKNKENKNLYKLRKLHKQILCIADTSYEVPYKFESDEEVYQSVNGFLDNISSKHIVERLRKIGDNYNGYNLDKIYIVSKFYESVSQKTYRDWETINTALEIHYNNILPGNGKSKADKVKKAVKNDLQKSITEINELVSNYKLCPDDNIKAETYIHEISHILNNFEAQELKYNPEIHLVESELKASELKNVLDVIMNAFHWCSVFMTEELVDKDNNFYAELEEIYDEIYPVISLYNLVRNYVTQKPYSTKKIKLNFGIPTLADGWSKSKEYSNNAIILMRDNLYYLGIFNAKNKPEKKIIEGNTSENKGDYKKMIYNLLPGPNKMIPKVFLSSKTGVETYKPSAYILEGYKQNKHLKSSKDFDITFCRDLIDYFKNCIAIHPEWKNFGFDFSDTSTYEDISGFYREVELQGYKIDWTYISEKDIDLLQEKGQLYLFQIYNKDFSKKSTGNDNLHTMYLKNLFSEENLKDVVLKLNGEAEIFFRKSSIKNPIIHKKGSILVNRTYEAEEKDQFGNIQIVRKTIPENIYQELYKYFNDKSDKELSDEAAKLKNAVGHHEAATNIVKDYRYTYDKYFLHMPITINFKANKTSFINDRILQYIAKEKDLHVIGIDRGERNLIYVSVIDTCGNIVEQKSFNIVNGYDYQIKLKQQEGARQIARKEWKEIGKIKEIKEGYLSLVIHEISKMVIKYNAIIAMEDLSYGFKKGRFKVERQVYQKFETMLINKLNYLVFKDISITENGGLLKGYQLTYIPEKLKNVGHQCGCIFYVPAAYTSKIDPTTGFVNIFKFKDLTVDAKREFIKKFDSIRYDSDKNLFCFTFDYNNFITQNTVMSKSSWSVYTYGVRIKRRFVNGRFSNESDTIDITKDMEKTLEMTDINWRDGHDLRQDIIDYEIVQHIFEIFKLTVQMRNSLSELEDRNYDRLISPVLNENNIFYDSAKAGDALPKDADANGAYCIALKGLYEIKQITENWKEDGKFSRDKLKISNKDWFDFIQNKRYL

SEQ ID NO: 49 - protein, 1282 aa, Lachnospira sp.
MNGNRSIVYREFVGVTPVAKTLRNELRPVGHTQEHIIQNGLIQEDELRQEKSTELKNIMDDYYREYIDKSLSGVTDLDFTLLFELMNLVQSSPSKDNKKALEKEQSKMREQICTHLQSDSNYKNIFNAKLFKEILPDFIKNYNQYDVKDKAGKLETVALFNGFSTYFTDFFEKRKNVFTKEAVSTSIAYRIVHENSLIFLANMTSYKKISEKALDEIEVIEKNNQDKMGDWELNQIFNPDFYNMVLIQSGIDFYNEICGVVNAHMNLYCQQTRNNYNLFKMRKLHKQILAYTSTSFEVPKMFEDDMSVYNAVNAFIDETEKGNIIVKLKDIVNKYDELDEKRIYISKDFYETLSCFISGNWNLITGCVENFYDENIHAKGKSKEEKVKKAVKEDKYKSINDVNDLVEKYIDEKERNEFKNSNAKQYIREISNIITDTETAHLEYDEHISLIESEEKADEMKKRLDMYMNMYHWAKAFIVDEVLDRDEMFYSDIDDIYNILENIVPLYNRVRNYVTQKPYNSKKIKLNFQSPTLANGWSQSKEFDNNAIILIRDNKYYLAIFNAKNKPDKKIIQGNSDKKNDNDYKKMVYNLLPGANKMLPKVFLSKKGIETFKPSDYIISGYNAHKHIKTSENFDISFCRDLIDYFKNSIEKHAEWRKYEFKFSATDSYNDISEFYREVEMQGYRIDWTYISEADINKLDEEGKIYLFQIYNKDFAENSTGKENLHTMYFKNIFSEENLKDIIIKLNGQAELFYRRASVKNPVKHKKDSVLVNKTYKNQLDNGDVVRIPIPDDIYNEIYKMYNGYIKESDLSEAAKEYLDKVEVRTAQKDIVKDYRYTVDKYFIHTPITINYKVTARNNVNDMAVKYIAQNDDIHVIGIDRGERNLIYISVIDSHGNIVKQKSYNILNNYDYKKKLVEKEKTREYARKNWKSIGNIKELKEGYISGVVHEIAMLMVEYNAIIAMEDLNYGFKRGRFKVERQVYQKFESMLINKLNYFASKGKSVDEPGGLLKGYQLTYVPDNIKNLGKQCGVIFYVPAAFTSKIDPSTGFISAFNFKSISTNASRKQFFMQFDEIRYCAEKDMFSFGFDYNNFDTYNITMGKTQWTVYTNGERLQSEFNNARRTGKTKSINLTETIKLLLKDNEINYADGHDVRIDMEKMDEDKNSEFFAQLLSLYKLTVQMRNSYTEAEEQEKGISYDKIISPVINDEGEFFDSDNYKESDDKECKMPKDADANGAYCIALKGLYEVLKIKSEWTEDGFDRNCLKLPHAEWLDFIQNKRYE

SEQ ID NO: 50 - protein, 1304 aa, Lachnospira pectinoschiza
MNNVTGDFSEFVAISKVQKTLRNELRPTPLTMKHIKQKGIITEDEYKTQQSLELKRIADGYYRDYITHKLNDTNNLDFRNLFEAIEEKYKKNDKDNRDKLDLVEKSKRGEIAKLLSADDNFKSMFEAKLITQLLPVYVEQNYIGEDKEKALETIALFKGFTTYFTDYFNIRKNMFKENGGASSICYRIVNVNASIFYDNLKTFMCIKEKAETEIALIEEELTELLDSWRLEHIFSEDYYNELLAQKGIDYYNQICGDVNKHMNLYCQQNKLKANVFKMTKLQKQIMGISEKAFEIPPMYQNDEEVYAAFNGFISRLEEVKLIDRLGNVLQNSNIYDTAKIYINARCYTNVSSYVYGGWGVIESAIERYWYNTIAGKGQSKAKKIEKAKKDNKFMSVKELDSIVSDYEPDYFNASNMDDDNSGRAFSGHGVLGYFNKMSKLLANMSLHTITYDSGDSLIENKETALNIKKDLDDIMSIYHWLQTFIIDEVVEKDNAFYAELEDIYYELENVVTLYDRIRNYVTRKPYSTQKFKLNFASPTLASGWSRSKEFDNNAIILLRNNKYYIAIFNVNNKPDKQIIKGSEEQRLSTDYKKMVYNLLPGPNKMLPWVFIKSNTGKRDYNPSSYILEGYEKNRHIKSSGNFDINYCHDLIDYYKACINKHPEWKNYGFKFKETTQYNDIGQFYKDVEKQGYSISWAYISEADINRLDEEGKIYLFEIYNKDLSSHSTGKDNLHTMYLKNIFSEDNLKNICIELNGNAELFYRKSSMKRNITHKKDTVLVNKTYINEAGVRVSLTDEDYIKVYNYYNNDYVIDVEKDKKLVEILERIGHRKNPIDIIKDKRYTEDKYFLHFPITINYGVDDENINAKMIEYIAKHNNMNVIGIDRGERNLIYISVINNKGNIIEQKSFNLVNNYDYKNKLKNMEKTRDNARKNWQEIGKIKDVKNGYLSGVISKIARMVVDYNAIIVMEDLNRGFKRGRFKVERQVYQKFENMLISKLNYLVFKEKKADENGGILKGYQLTYLPKSALQIGKQCGCIFYVPAAYTSKIDPATGFINIFDFKKYSGSAINAKVKDKKEFLMSMNSIRYVNEGSAEYEKIGHRQLFAFSFDYNNFKTYNVSIPVNEWTTYTYGERIKKLYKDGRWSGSEVLNLTEDLIELMEQYGIEYKDGHDIREDISHMDEMRNADFICNLFEKFKYTVQLRNSKSEAEGDDYDRLVSPVLNSHNGFFDSSDYKENEKSDDIIDDKQIMPKDADANGAYCIALKGLYEINKIKENWSDDKKLKESELYIGVTEWLDYIQNRRFE

SEQ ID NO: 51 - protein, 1264 aa, Moraxella lacunata
MLFQEFTHLYPLSKTVRFELKPIGKTLEHIHAKDFLSQDETMADMYQKVKAILDDYHRDFIADMMSGVVLTKLAEFYEVYLALRKTPKDDSLQKQLTEIQTALRKEIVKPIGSGGKYKAGYDRLFGAKLFKDGKELGDLAKFVITQEGESSPKLAHIAHFEKFSTYFTGFHDNRKNMYSDEDKHTAIAYRLIHENLPRFIDNLQILATIKQKHSALYDQIVNELNANGLDVSLASHLDGYHKLLTQEGITAYNTLLGGISGEAGSRKIQGINELINIHHNQHCQKSERIAKLRPLHKQILSDGMGVSFLPSKFADDSEVCQAVNEFYRHYAHVFAKVQSLFDRFDDYRKDGIYVEHKNLNELSKQAFGDFALLGRVLDGYYVDVVNPEFNERFAKAKTDNAKEKLTKEKDKFIKGVHSLASLEQAIEHYIAGHDDESVQAGKLGQYFKHGLAGVDNPIQKIHNSHSTIKGFLERERPAGERALPKIKSDKSPEMTQLRQLKELLDNALNVVHFAKLLTTKTTLDNQDGNFYGEFGALYDELAKIATLYNKVRDYLSQKPFSTEKYKLNFGNPTLLNGWDLNKEKDNFGVILQKDGCYYLALLDKAHKKVFDNAPNAGKSVYQKMVYKLLPGPNKMLPKVFFAKSNLDYYNPSAELLDKYAQGTHKKGNNFNLKDCHALIDFFKASINKHPEWQHFGFEFSPTSSYQDLSDFYREVEPQGYQVKFVDINAEYIDELVEQGQLYLFQIYNKDFSPKAHGKPNLHTLYFKALFSENNLANPIYKLNGEAEIFYRKASLDMNETTIHRAGEVLENKNPDNPKKRQFVYDIIKDKRYTQDKFMLHVPITMNFGVQGMTIKEFNKKVNQSIQQYNDVNVIGIDRGERHLLYLTVINSKGEILEQRSLNDIITTSANGTQMTTPYHKILDKREIERLNARVGWGEIETIKELKSGYLSHVVHQISQLMLKYNAIVVLEDLNFGFKRGRFKVEKQIYQNFENALIKKLNHLALKDKADDEIGSYKNALQLTNNFTDLKSIGKQTGFLFYVPAWNTSKIDPATGFVDLLKPRYENIAQSQAFFGKFDKIFYNADKGYFEFYVDYAKFTDKAKNSRQTWVICSHGDKRYVYDKTANQNKGATIGINVNDELKSLFARYHINDKQPNLVMDICQNNDKEFHKSLMYLLKALLALRYSNASSDEDFILSPVADDKGVFFNSALADDTQPQNADANGAYHIALKGLWLLNELKNSNDLDKIKLAIDNQTWLNFAQNR

SEQ ID NO: 52 - protein, 1264 aa, Moraxella lacunata; identical to SEQ ID NO: 51

SEQ ID NO: 53 - protein, 802 aa, unidentified
  source 1..802: note = Candidatus Sungbacteria
MGKLDAGYRAKNKTFSKLNLKIFDRGKKDDHVDKLKDALECGLNIVQFVKYFALSSKKAEDKPASISSEFYNRYDDLYGEPDAKHIIVRYHDAFRNFLTLKLEDADKIKINFESGTPIKWTTRGYIFRDRDTQIYNVGILVKGGGTQSDFEPNKKTKGVYGIESSPFEQMFYQQLKFQTLAGRAYIRDYKLKYSQDPNAVLHLQELIKKQFIKTYPSLQPLISSKYTSKKEFDLAVKECLKGCYALAFMPVVRDYVIKKESEGAIYLFEISYRDKRSKIGALKNIHTLYFEELFSQKNCEHVTLKLNSEGTEIFSRKAQIQEEHEKRRNVEVIKKKRYTTDKIFLHLPIKLNPNAEQVNAGFRYRYNQEINSMALGHGEGNIIGIDRGEKHLAFYSVINRDSKIIASGSFNEINGVNYFEMLRMREKERLEQRRSWKAVSQIKDLKGGYISQVIHQLAELVIEHNAIIVFEDLNLRFKEIRGGVERSVYQQLEKAVIEKFSYMVFKKREALAPGGVLNGYQFATPVQSFEEMSRQNGIIFYVNPEYTSITDPITGWRQHIYLSSSANDSTLLEAFTKKIQIGWDELKQSYTFSYNQKDFARDKDAVSHEWVLYADMPRIDRYRNKDGYWEAHKINPNELLKELFSAWEFHQLEGDMSEQIAIMYADKALQGEREVNGKKQRFFKALRYYLNIIQQIRNSDSVRYVPDRDKEGNIKEDKDNKWVVKKIGDDIDFIASPVEPFFAIPSQYSKENLCGLKIENGDANGAYNIARKGIIALQRVRENPEKPELYITRSDWDRFVQK

SEQ ID NO: 54 - protein, 1244 aa, unidentified
  source 1..1244: note = Candidatus Wildermuthbacteria
MLFEAGVFRLLKERFKNEKDTTVDGNNIFDEWTRWTGYFKKFFETRKNFYKSDDTSTAIAYRVINQNLRRFCENIQIFEKISEKIEFSEVEKSFDISCAGIFSLAYYNACLLQGGIDTYNKIIGGEVDEKDKKIPGINELINKYRQDNSGEKIPFLKQLDKQIHSAKEAFIESIETNKELVGKLKTFYENAEVKIQSFRNLIADIVTDYSGYDIDKIYLTKEAVSHNASRWFASFESFERDLFAVVAEKQNKLVYELLRTHKNDSKISDKDGKFSFPDFIKCSHIKRALEKQEGRIWKGEYYEDIVDFEKIKDVFTQFLCVFKFELEQQFFRKTTSAQTGEQTKIGYEIFVTKINELITRENPVIDLEEKIAIKNFADATLLIYQIAKYFAVEKRRGWLDNYDLDDRFYKSSDIGYLNFYRDAFEQIVRPYNLFRNYLTKKPYNTNKWVLSFENPTLADGWDKNKEKTNAAVILRKDGRYYLGIIKEDCKSLFADRYSKEMSEGIESGSFQKMAYKFFPEASKMIPKCSTQTKNVKEHFRKSSSDYNLFHEKDYKISVAITKNIYELNNVFYRKDNIEESFVPKNDFEKKLGVKKFQRQYLEISRDNNGYKQALAQWIEFCIRFLKAYKSTTIFDYSRLREAKEYESLDAFYQDINALTYNISFVPISEQYIKEKNDNGELFLFEIYNKDWSLGPMDKNRKRTKNLHTLYFEQLFSKENEQENFLFQLNGEAELFFRPKTEEKRLGYKVWDAGEKKWVKAKEKEDGAVIDRKRYAKDIILFHCPITLNRVSESKTKREMDVEIREVLSSTPGVHIIGVDRGEKHLAYYSVIDQNGKIIETDTLNSIGKDGRGKPVEYASKLEKRAQEREASRRDWEEVEAIKDLKKGYISQVIRNLADLIIKHNAIIVFEDLNMRFKQIRGGIEKSAYQQLERALIDKLSFLVKKGEEDPKQTGHILRAYQLAAPVIAFKDMGKQTGLIFYTQAGYTSKTCPECGYRRNIKCLFENIEQAKTLIENLESINYNKKEDVFQISYSLEKLSSKDQKKEKKVSNELYAKTLKKDIFILTTKNALRYKWYDRYSEKAKVAKRGIDEYKGEVNESETKKGVVKEFNLTEYLKGLLKTYEIDYEHGGIREQILSVARGREFYKDFLYALFLLTETRHSISGRNTDYIQCPECEFDSRKGFKDIKEFNGDANGAYNIARKGIMILEKIKQFKKDNDGNLEKMGWGDLSISIEEWDKFTQKE

SEQ ID NO: 55 - protein, 1244 aa, unidentified; identical to SEQ ID NO: 54
  source 1..1244: note = Candidatus Wildermuthbacteria

SEQ ID NO: 56 - protein, 1322 aa, unidentified
  source 1..1322: note = Candidatus Gottesmanbacteria
MTGIFKDFTHLYELQKTLRFELIPVGRTKELLEKNHVFEKDEKIAENYKDVKKYFDRLHKEFIKDAFSHTNLPENLLEGYEQKYFSHKLNPSRASRIDLEKIAKRLRTILLKSFNTEADQWKNRYLKNIEQTLKNKNEKQQKKELEKKLKKIKEGTKGIELFFKVEVFDFLKYKYPEAQINGKSIFDPFNKFGCYFKKFHETRINFYKDDGTSTAIPTRIINDNLSIFLENKKIFESKYSKKHKSVFAKNELRIFVLFYFNNCFSQKQIDGYNNTIALINSNVNQLRQNNPEVSKKDLPFFKRLFKQILSQPSKQEIEQDSFIEIFQDEDVFPTMQKFINENKICIPKAKSIFKKFISSQKVKSDEYNISQIYVAKRFINTISNKWFSNWNTIRNLLIPKDKKNIPDFISVTSLKAALQKTQNIVEVNDLFRKEYRDILEEGSDFYQIFLKIWEKEFEKATDIYLNETKEIEKMITEDKKYLPNKKGRLKSGKKGSIQKEKFLDYTQSVFDIYLMMKYFSLEKGKERVWNPEALDEDAIGGFYEKFKEYYENINTWKYFNVFRNYLTKKPYNSEKIKLNFECSSLLSGWSKNYDSYGALIFEKNEKYYLGIINGTKFTKDEIEQLYLDIRNNNISLRLVYNYQKPDFKNFPKLFIRSSGSNFAPAVKKYNLPIDSVLNIYDKGLFKTSNKSSQNYHESLKKIIDYFKLGISQHESYKGFSFKWQETSEYDNISDFYKDATRSCYKVTWENINFSKLYELIESGRLYLFQIYNKDFELDENIAPKGYNFKDKNGRRNLHSIYWKALFSNTNFKKTILKLNGGAELFYRKLTKNLTKDPIITVKNQIKIIKKNNNIFHKKRFTQNKIYFHCPVSINFTENDWKINTKICNTIRNNSKVKIIGIDRGEKNLAYYSVIDHQGNILETDSFNEVQEREDREPTDYQKKLDQIQKERDWQRKSWQEISSIKEMKKGYISQVVHQICKLIRKYEAIVVFEDLNIGFKRGRFAIEKQIYQNLELALAKKLNYMVFKDAKEEETGHFLQAYQLTPPVINFQDIGKQCGIIFYVPASYTSAICPACGFRKNISTSVEKIEKNIDLINKFNIVYDPDKDRFCFRYKRSDFIKSEKEKEDDSKVKLYSNTKLPDDFTFYSNVERFKYIRDQNNRGGKVELKYPNDSLKKLFHENGINFQNFSNISQLIKTRNFENENFYKPFIYIISLILQLRNTTIEINQNENNEKYRDFISCPHCYFHSENNLITLTKRYKGKKPFEFNGDANGAYNIARKGILILQKINKAKRLEEIEYGGLTVTQQEYDKYLALVSSKKA

SEQ ID NO: 57 - protein, 1300 aa, Francisella tularensis; identical to SEQ ID NO: 6

SEQ ID NO: 58 - protein, 1069 aa, Francisella hispaniensis
MSIYQGFVNKYNLSKTLRFELIPQGKTRENIKIKGLILDDEKRAKDYKKAKQIIDKYHQFFIEEILSSVCIGEDLLQNYSNIYFKLKKTDDDNLQKEFKNAKDTIKKQISKHINDSERFKNLFNQNLIDAKKGQESDLILWLKQSKDNGIELFKANNDITDIDEALEIIKSFKGWTTYFKGFHDNRKNVYSTDDIPTSIIYRIVDDNLPKFLENKAKYESLKDKAPEAINYEQIKKDLAEELTFDIDYKTSEVNQRVFSLDEVFEIANFNNYLNQSGISKFNTVIGGKFVNGESAKRKGINEYINLYSQQTNDKTLKKFKMSVLFKQILSDTESKSFVIDKLEDDSDVVTTIQSFYEQIAAFKIVEEKSIKETLSLLFDDLKAQKLDLSKVYFKNDKSLTDLSQQVFDDYSVISTAVLEYITQQVAPKNVDNPTKKEQELIAKKTQKAKYLSLETIRDALNEFNKHRDIDKQCQFEKILANFADIPRLLDEITQHKGNLAHIFVKYQNQDKKDLLQTSAEGDVKAIKELLDQTNNLLHKLKIFHITQSEDKANILDKDEHFYLVFEECYFELANIVPIYNKVRNYITQKPYSDEKFKLNFDNSTLANGWDKNKESDNTAILFIKDDKYYLGVMDKKNNKIFNDKAIKENKGEDYKKVVYKLLPGANKMLPKVFFSAKSVNYYNPDKEILRIRNHSTHTKNGSPQKGYEKFEFNIEDCRKFIDFYKQSISRHPEWKDFGFRFSDTKKYNSIDEFYREVENQGYKLTFENISKSYIDSLVNEGKLYLFQIYNKDFSAYSKGRPNLHTLYWKALFDERNLQDVVYKLNGEAELFYRKQSIPKKITHPAKEVIANKNKDNPKKESVFEYDLIKDKRFTEDKFFFHCPITMNFKSSGANKFNDEINLLLKEKANDVHILSIDRGERHLAYYTLVDGKGNIIKQDTFNIIGNDRMKTNYHDKLTAIEKDRDSARKDWKKINNIKEMKEGYLSQVVHEIATLVIDYNAIVIFEDLNFGFKRGRFKVEKQVYQKLEKMLIEKLNYLVFKDNEFDKAGGVLRAYQLTSPFETFKKMGK

SEQ ID NO: 59 - protein, 1263 aa, unidentified
  REGION 1..1263: note = Sequence from GenBank assembly GCA_001916395.1
MNNGTNNFQNFIGISSLQKTLRNALIPTETTQQFIVKNGIIKEDELRGKNRQILKDIMDDYYRGFISETLSSIDDIDWTSLFEKMEIQLKNGDNKDTLIKEQAEKRKAIYKKFADDDRFKNMFSAKLISDILPEFVIHNNNYSASEKKEKTQVIKLFSRFATSFKDYFKNRANCFSADDISSSSCHRIVNDNAEIFFSNALVYRRIVKNLSNDDINKISGDMKDSLKEMSLEEIYSYEKYGEFITQEGISFYNDICGKVNSFMNLYCQKNKENKNLYKLRKLHKQILCIADTSYEVPYKFESDEEVYQSVNGFLDNISSKHIVERLRKIGDNYNDYNLDKIYIVSKFYESVSQKTYRDWETINTALEIHYNNILPGNGKSKADKVKKAVKNDLQKSITEINELVSNYKLCSDDNIKAETYIHEISHILNNFEAHELKYNPEIHLVESELKASELKNVLDIIMNAFHWCSVFMTEELVDKDNNFYAELEEIYDEIYPVISLYNLVRNYVTQKPYSTKKIKLNFGIPTLADGWSKSKEYSNNAIILMRDNLYYLGIFNAKNKPDKKIIEGNTSENKGDYKKMIYNLLPGPNKMIPKVFLSSKTGVETYKPSAYILEGYKQNKHLKSSKDFDITFCHDLIDYFKNCIAIHPEWKNFGFDFSDTSAYEDISGFYREVELQGYKIDWTYISEKDIDLLQEKGQLYLFQIYNKDFSKKSTGNDNLHTMYLKNLFSEENLKDIVLKLNGEAEIFFRKSSIKNPIIHKKGSILVNRTYEAEEKDQFGNIQIVRKTIPENIYQELYKYFNDKSDKELSDEAAKLKNVVGHHEAATNIVKDYRYTYDKYFLHMPITINFKANKTSFINDRILQYIAKEKDLHVIGIDRGERNLIYVSVIDTCGNIVEQKSFNIVNGYDYQIKLKQQEGARQIARKEWKEIGKIKEIKEGYLSLVIHEISKMVIKYNAIIAMEDLSYGFKKGRFKVERQVYQKFETMLINKLNYLVFKDISITENGGLLKGYQLTYIPDKLKNVGHQCGCIFYVPAAYTSKIDPTTGFVNIFKFKDLTVDAKREFIKKFDSIRYDSEKNLFCFTFDYNNFITQNTVMSKSSWSVYTYGVRIKRRFVNGRFSNESDTIDITKDMEKTLEMTDINWRDGHDLRQDIIDYEIVQHIFEIFKLTVQMRNSLSELEDRDYDRLISPVLNENNIFYDSAKAGYALPKDADANGAYCIALKGLYEIKQITENWKEDGKFSRDKLKISNKDWFDFIQNKRYL

SEQ ID NO: 60 - protein, 1305 aa, unidentified
  REGION 1..1305: note = Sequence from GenBank assembly GCA_001916455.1
MNKAADNYTGGNYDEFIALSKVQKTLRNELKPTPFTAEHIKQRGIISEDEYRAQQSLELKKIADEYYRNYITHKLNGINNLDFYNLFDAIEEKYKKNDKDNRDKLDLVEKSKRGEIAKLLSADDNFKSMFEAKLITKLLPDYVEQNYIDEDKEKALETIALFKGFTTYFTDYFNIRKNMFKENGGASSICYRIVNVNASIFYDNLKTFMCIKEKAETEIALIEEELTELLDSWRLEHIFSEDYYNELLAQKGIDYYNQICGDVNKHMNLYCQQNKLKANVFKMTKLQKQIMGISEKAFEIPPMYQNDEEVYASFNEFISRLEEVKLTDRLRNILQNINIYNTAKIYINARYYTNVSTYVYGGWGVIESAIERYLCNTIAGKGQSKVKKIENAKKDNKFMSVKELDSIVAEYEPDYFNAPYIDDDDNAVKAFGGQGVLGYFNKMSELLADVSLYTIDYNSDDSLIENKESALRIKKQLDDIMSLYHWLQTFIIDEVVEKDNAFYAELEDICCELENVVTLYDRIRNYVTKKPYSTQKFKLNFASPTLAAGWSRSKEFDNNAIILLRNNKYYIAIFNVNNKPDKQIIKGSEEQRLSTDYKKMVYNLLPGPNKMLPKVFIKSDTGKRDYNPSSYILEGYEKNRHIKSSGNFDINYCHDLIDYYKACINKHPEWKNYGFKFEETTQYNDIGQFYKDVEKQGYSISWVYISEADINRLDEEGKIYLFEIYNKDLSSHSTGKDNLHTMYLKNIFSEDNLKNICIELNGNAELFYRKSSMKRNITHKKDTVLVNKTYINEAGVRVSLTDEDYIKVYNYYNNDYVIDVEKDKKLVEILERIGHRKNPIDIIKDKRYTEDKYFLHLPITINYGVDDENINAKMIEYIAKHNNMNVIGIDRGERNLIYISVINNKGNIIEQKSFNLVNSYDYKNKLKNMEKTRDNARKNWQEIGKIKDVKSGYLSGVISKIARMVIDYNAIIVMEDLNKGFKRGRFKVERQVYQKFENMLISKLNYLVFKERKADENGGILRGYQLTYIPKSIKNVGKQCGCIFYVPAAYTSKIDPSTGFINIFDFKKYSGSGINAKVKDKKEFLMSMNSIRYINEGSEEYEKIGHRELFAFSFDYNNFKTYNVSSPVNEWTAYTYGERIKKLYKDGRWLRSEVLNLTENLIKLMEQYNIEYKDGHDIREDISHMDETRNADFICSLFEELKYTVQLRNSKSEAEDENYDRLVSPILNSSNGFYDSSDYMENENNTTHTMPKDADANGAYCIALKGLYEINKIKQNWSDDKKLKESELYIGVTEWLDYIQNRRFE

SEQ ID NO: 61 - protein, 1314 aa, unidentified
  source 1..1314: note = Sedimentisphaera cyanobacteriorum
GEIQMKEFTNQYSLTKTLRFELRPVGETAEKIEDFKSGGLKQTVEKDRERTEAYKQLKEVIDSYHRDFIEQAFARQQTLSEEDFKQTYQLYKEAQKEKDGETLTKQYEHLRKKIAAMFSKATKEWAVMGENNELIGKNKESKLYQWLEKNYRAGRIEKEEFDHNAGLIEYFEKFSTYFVGFDKNRANMYSKEAKATAISFRTINENMVKHFDNCQRLEKIKSKYPDLAEELKDFEEFFKPSYFINCMNQSGIDYYNISAIGGKDEKDQKANMKINLFTQKNHLKGSDKPPFFAKLYKQILSDREKSVVIDEFEKDSELTEALKNVFSKDGLINEEFFTKLKSALENFMLPEYQGQLYIRNAFLTKISANIWGSGSWGIIKDAVTQAAENNFTRKSDKEKYAKKDFYSIAELQQAIDEYIPTLENGVQNASLIEYFRKMNYKPRGSEEDAGLIEEINNNLRQAGIVLNQAELGSGKQREENIEKIKNLLDSVLNLERFLKPLYLEKEKMRPKAANLNKDFCESFDPLYEKLKTFFKLYNKVRNYATKKPYSKDKFKINFDTATLLYGWSLDKETANLSVIFRKREKFYLGIINRYNSQIFNYKIAGSESEKGLERKRSLQQKVLAEEGEDYFEKMVYHLLLGASKTIPKCSTQLKEVKAHFQKSSEDYIIQSKSFAKSLTLTKEIFDLNNLRYNTETGEISSELSDTYPKKFQKGYLTQTGDVSGYKTALHKWIDFCKEFLRCYRNTEIFTFHFKDTKEYESLDEFLKEVDSSGYEISFDKIKASYINEKVNAGELYLFEIYNKDFSEYSKGKPNLHTIYWKSLFETQNLLDKTAKLNGKAEIFFRPRSIKHNDKIIHRAGETLKNKNPLNEKPSSRFDYDITKDRRFTKDKFFLHCPITLNFKQDKPVRFNEQVNLYLKDNPDVNIIGIDRGERHLLYYTLINQNGEILQQGSLNRIGEEESRPTDYHRLLDEREKQRQQARETWKAVEGIKDLKAGYLSRVVHKLAGLMVQNNAIVVLEDLNKGFKRGRFAVEKQVYQNFEKALIQKLNYLVFKEVNSKDAPGHYLKAYQLTAPFISFEKLGTQSGFLFYVRAWNTSKIDPATGFTDQIKPKYKNQKQAKDFMSSFDSVRYNRKENYFEFEADFEKLAQKPKGRTRWTICSYGQERYSYSPKERKFVKHNVTQNLAELFNSEGISFDSGQCFKDEILKVEDASFFKSIIFNLRLLLKLRHTCKNAEIERDFIISPVKGNNSSFFDSRIAEQENITSIPQNADANGAYNIALKGLMNLHNISKDGKAKLIKDEDWIEFVQKRKF

SEQ ID NO: 62 - protein, 1284 aa, unidentified
  source 1..1284: note = Limihaloglobus sulfuriphilus
MKDFTHQYSLSKTLRFELKPVGETAERIEDFKNQGLKSIVEEDRQRAEDYKKMKRILDDYHKEFIEEVLNDDIFTANEMESAFEVYRKYMASKNDDKLKKEITEIFTDLRKKIAKAFENKSKEYCLYKGDFSKLINEKKTGKDKGPGKLWYWLKAKADAGVNEFGDGQTFEQAEEALAKFNNFSTYFTGFNQNRDNIYTDAEQQTAISYRVINENMTRYFDNCIRYSSIENKYPELVKQLEPLSGKFAPGNYKDYLSQTAIDIYNEAVGHKSDDINAKGINQFINEYRQRNSIKGRELPIMSVLYKQILSDINKDLIIDKFENAGELLDAVKTLHRELTDKKILLKIKQTLNEFLTEDNSEDIYIKSGTDLTAVSNAIWGEWSVIPKALEMYAENITDMNAKAREKWLKREAYHLKTVQEAIEAYLKDNEEFETRNISEYFTNFKSGENDLIQVVQSAYAKMESIFGIEDFHKDRRPVTESGEPGEGFRQVELVREYLDSLINVEHFIKPLHMFRSGKPIELEDCNSNFYDPLNEAYKELDVVFGIYNKVRNYVTQKPYSKDKFKINFQNSTLLDGWDVNKESANSSVLLLKNGKYYLGVMKQGASNILNYRPEPSDSKNKINAKKQLSEIALAGATDDYYEKMIYKLLPDPAKMLPKVFFSAKNIEFYNPSQEIIYIRENGLFKKDAGDKESLKKWIGFMKTSLLKHPEWGSYFNFEFEPAEDYQDISIFYKQVAEQGYSVTFDKIKTSYIEEKVASGELYLFEIYNKDFSPHSKGRPNLHTMYWKSLFEKENLQNLVTKLNGEAEVFFRQHSIKRNEKVVHRANRPIQNKNPLTEKKQSIFEYDLVKDRRFTKDKFFLHCPITLNFKEAGPGRFNDKVNKYIAGNPDIRIIGIDRGERHLLYYSLIDQSGRIVEQGTLNQITSTLNSGGREIPKTTDYRGLLDTKEKERDKARKSWSMIENIKELKSGYLSHIVHKLAKLMVKNNAVVVLEDLNFGFKRGRFKVEKQVYQKFEKALIEKLNYLVFKDARPAEPGHYLNAYQLTAPLESFKKLGKQSGFIYYVPAWNTSKIDPVTGFVNQFYIEKNSMQYLKNFFGKFDSIRFNPDKNYFEFGFDYKNFHNKAAKSKWTICTHGDKRSWYNRKQRKLEIHNVTENLASLLSGKGINFADGGSIKDKILSVDDASFFKSLAFNFKLTAQLRHTFEDNGEEIDCIISPVAAADGTFFCSETAKKLNMELPHDADANGAYNIARKGLMVLRQIRESGKPKPISNADWLDFAQQNED

SEQ ID NO: 63 - protein, 1261 aa, Moraxella bovis
MLFQEFTHLYPLSKTVRFELKPIGKTLEHIHAKNFLSQDETMADMYQKVKAMLDDYHRDFIADMMGEVKLTKLAEFYDVYLKFRKNPKDDGLQKQLKDLQAVLRKEIVKPIGNGGKYKAGYDRLFGAKLFKDGKKLGDLAKFVIAQEGDSSPKLAHLAHFEKFSTYFTGFHDNRKNMYSDEDKHTSIAYRLIHENLPRFIDNLQILTTIKQKHSALYDQIINELTASGLDVSLASHLDGYHKLLTQEGITAYNTLLGGISGEAGSRKIKGINELINSHHNQHCHKSERIAKLRPLHKQILSDGMGVSFLPSKFADDSEVCQAVNEFYRHYADVFAKVQSLFDGFDDYQKDGIYVEHKNLNELSKQAFGDFALLGRVLDGYYVDVVSPEFNERFAKAKTDNAKEKLTKEKDKFIKGVHSLASLEQAIEHYTARHDDESVQAGKLGQYFKHGLAGVDNPIQKIHNNHSTIKGFLERERPAGERALPKIQLGKNPEIRQLKELLDNTLNVVHFAKLLTTKTTLDNQDGNFYGEFGALYDELAKIPTLYNKVRDYLSQKPFSTEKYKLNFGNPTLLNGWDLNKEKDNFGVILQKDGCYYLALLDKAHKKVFDNAPNTGKNIYQKMIYKLLPGPNKMLPKVFFAKSNLDYYNPSAELLDKYAKGTHKKGDNFNLKDCHALIDFFKAGINKHPEWQHFGFKFSPTSSYQDLSDFYREVEPQGYQVKFVDINADYIDELVEQGQLYLFQIYNKDFSPKAHGKPNLHTLYFKALFSEDNLADPIYKLNGEAQIFYRKASLDMNETTIHRAGEVLENKNPDNPKKRQFVYDIIKDKRYTQDKFMLHVPITMNFGVQGMTIKEFNKKVNESIQQYDEVNVIGIDRGERHLLYLTVINSKGEILEQRSLNDIITTSANGTQMTTHYHKILDKREIERLNARVGWGEIETIKELKSGYLSHVVHQISQLMLKYNAIVVLEDLNFGFKRGRFKVEKQIYQNFENALIKKLNHLVLKDKADDEIGSYKNALQLTNNFTDLKSIGKQTGFLFYVPAWNTSKIDPETGFVDLLKPRYENIAQSQAFFGKFDKICYNADKGYFEFHIDYAKFTDKAKNSRQKWTICSHGDKRYVYDKTANKNKGTTKGINVNDELKSLFARHHINEKQPNLVMDICQNNDKEFHKSLMYLLKTLLALRYSNASSDEDFILSPVANDEGVFFNSALADDTQPQNADANGAYHIALKGLWLLNELKDSDDLNKVKLAIDNQTWLNFAQNR

SEQ ID NO: 64 - protein, 1251 aa, Moraxella lacunata
MLFQDFTHLYPLSKTVRFELKPIGKTLEHIHAKNFLSQDETMADMYQKVKAILDDYHRDFITKMMSEVTLTKLPEFYEVYLALRKNPKDDTLQKQLTEIQTALREEVVKPIDSGGKYKAGYERLFGAKLFKDGKELGDLAKFVIAQEGESSPKLPQIAHFEKFSTYFTGFHDNRKNMYSSDDKHTAIAYRLIHENLPRFIDNLQILVTIKQKHSVLYDQIVNELNANGLDVSLASHLDGYHKLLTQEGITAYNRIIGEVNSYTNKHNQICHKSERIAKLRPLHKQILSDGMGVSFLPSKFADDSEMCQAVNEFYRHYAHVFAKVQSLFDRFDDYQKDGIYVEHKNLNELSKQAFGDFALLGRVLDGYYVDVVNPEFNDKFAKAKTDNAKEKLTKEKDKFIKGVHSLASLEQAIEHYIAGHDDESVQAGKLGQYFKHGLAGVDNPIQKIHNSHSTIKGFLERERPAGERTLPKIKSDKSLEMTQLRQLKELLDNALNVVHFAKLLTTKTTLDNQDGNFYGEFGALYDELAKIATLYNKVRDYLSQKPFSTEKYKLNFGNPTLLNGWDLNKEKDNFGVILQKDGCYYLALLDKAHKKVFDNAPNTGKSVYQKMVYKLLPGSNKMLPKVFFAKSNLDYYNPSAELLDKYAQGTHKKGDNFNLKDCHALIDFFKASINKHPEWQHFGFEFSLTSSYQDLSDFYREVEPQGYQVKFVDIDADYIDELVEQGQLYLFQIYNKDFSPKAHGKPNLHTLYFKALFSEDNLANPIYKLNGEAEIFYRKASLDMNETTIHRAGEVLENKNPDNPKERQFVYDIIKDKRYTQDKFMLHVPITMNFGVQGMTIKEFNKKVNQSIQQYDEVNVIGIDRGERHLLYLTVINSKGEILEQRSLNDIITTSANGTQMTTPYHKILDKREIERLNARVGWGEIETIKELKSGYLSHVVHQISQLMLKYNAIVVLEDLNFGFKRGRFKVEKQIYQNFENALIKKLNHLVLKDKADNEIGSYKNALQLTNNFTDLKSIGKQTGFLFYVPAWNTSKIDPVTGFVDLLKPRYENIAQSQAFFDKFDKICYNADKGYFEFHIDYAKFTDKAKNSRQIWTICSHGDKRYVYDKTANQNKGATIGINVNDELKSLFARYRINDKQPNLVMDICQNNDKEFHKSLTYLLKALLALRYSNASSDEDFILSPVANDKGVFFNSALADDTQPQNADANGAYHIALKGLWLLNELKNSDDLDKVKLAIDNQTWLNFAQNR

SEQ ID NO: 65 - protein, 1307 aa, unidentified
  REGION 1..1307: note = Sequence from GenBank assembly GCA_002297325.1
MKTVEQFCGQKNGYSRSITLRNRLIPVGKTEENLQKANMLEADFNRAKAYSEVKNLIDDFHRSFIEDVLSNTKLGWKNLYDVFDLCQLEKDKIKKEKQKKDLQSIQAAMRKAIVKKFKDDERFSKLFKKELLSDLLPSIIKNDESGTITDKNEALKVFKGFSTYFSGFHQNRENLYSDEAKATAISNRIVNENFPKFHANVKVFEYLQKNFPEIISDTEESLKAFLNGKKLSEIFNPEKFNAVLCQSGIDFYNTVIGGISDENGKQKIQGLNEKINLASQQLPPEEKSKLKKKMTVLYKQILSDKKTASFIPIGFEKSEEVYKSIKQLKEEYFDKAYKLIERTFSAPDYDLSEIFVPAKELTAFSLAIFGNWSILNDGLFLLEKDNSKKELTEKQVENLHKEISKKDYSLADLQKAYERWANENGVPADKTVKSYFSLSELRANEKTKEKEPVDIVEKIKITYEKIDFENIENLQAEKEAATPIKNFLDEVQCLFHHLKLVDYRGEEQKDSAFYSKLDEILIPLSEIISLYNKVRNFVTKKPGEVKKIKLNFECPTLANGWDLNKESSNDAIILRKNGKYFLGIFNPEDKPKFSNDSICKNQQESHYEKMIYKLLPGPNKMLPKVFFSTKGQETFLPPKDLLLGYEQGKHKKGESFDKSFMHKLIDWFKYAINQHEDWKNFNFKFSPTESYEDMSGFYKEVELQGYKITFQNISENYIDSLIDSGKLYLFQIYNKDFAEKADGKKNLHTLYWENLFSPENLKDICLKLNGDAELFYRPASENLKVIKHEKDSILVNRTTTDGETIRDETYQEIYKFKNPAKQKKGFKLSNEAKSLLDSGKVVFKKARFEITKDKHFLQNTYLFHCPITMNFKAPEITGKKFNERVLEYLRNNPDVKIIGLDRGERHLIYLSLINQNGEIELQKTLNIVEQIRGDKENPVSVNYQEKLVQKEGDRNKARKNWQTIGNIKELKEGYLSNIVHEIAKLMVEQNAIVVMEDLNFGFKRGRFAVERQVYQKFENMLIEKLNYFAFKDRPATEPGGILNAYQLTDKSANISDVGKQCGWIFYIPASYTSKIDPKTGFANLFNTKGLTNVEKKKEVFSKFDSIRYDSKENCFVFSVNYSKLGDNADFKKNWEIYTHGERIVYSRKENKTFSVNPTENLEKAFDGQFAQSGINWKNKENLIDLIENISAEKSNAKFFDELLRSFTTTLQMRNSVPNTEEDYLISPVKAADGTFFDSRNEIAKGKDSGGKWISKFPVDADANGAYHIALKGLYLLQNNFNLNPKGYIENISNADWFKFVQKKEYLK

SEQ ID NO: 66 - protein, 824 aa, unidentified
  source 1..824: note = Candidatus Pacebacteria
MTHFQRVAKDKITGKKIELGYFVFEKRIKELLDSDPSLNSQSKIIIKEFADEVLHIFQMAKYFALEKKREWKGDYYQLDDQFYNHIDYGFKDQFYENAYEKIVQPYNKIRNYLTKKPYSDVKWKLNFGNPTLANGWDKNKEADNTAVILKKDGNYYLGVMKKGKNKIFSDQNKEKYKAYNSAYYEKLVYKLFPDPSKMFPKVCFSKKGLNFFQPSEEILRIYKNNEFKKGNTFSISSMQKLIAFYIDCLGLYEGWKHYEFKNIKDVRQYKENIGEFYADVAESGYKLWFEKISEEYITQKNQLGELFLFQIYNKDFAKKTTGRKNLHTIYFEELFSQTNIDNNFPFKLNGQAELFYRPKSLEKIEEKRNFKRSIVNKKRYTQNKIFFHVPITLNRTSENIGRFNVRVNNFLANNSNVNIVGVDRGEKNLAYYSIIKQNGEVLKSGSLNIINGVDYHALLTDRAQRREQERRNWQDVESIKDLKRGYISQVVHELVSLAIKYNAIIVMEDLNMRFKQIRGGIEKSTYQQLEKALIEKLNFLVNKEETDSNQAGNLLNAYQLTAPFKTFKDMGKQTGIIFYTQASYTSKIDPLTGWRPNIYLRYSNAKQAKADILMFTNIYFSEKKDRFEFTYDLEKIDDKRKDLPIKTEWTVCSNVERFSWEKSLNNNKGGYVHYPIQDSNGEESITSKLKKLFMDFGIDLTDIKTQIESLDTNKKDNANFFRKFIFYFQLICQIRNTQVNKSDDGNDFIFSPVEPFFDSRFADKFRKNLPKNGDENGAYNIARKGLIILHKISDYFVKEGSTDKISWKDLSISQTEWDNFTTDK

SEQ ID NO: 67 - protein, 1204 aa, unidentified
  source 1..1204: note = Candidatus Falkowbacteria
MKQSTQYDDFTNVYSLSKTLRFELKPDPLTAEYIEKEQMLEKDKSISQSYQEIKEYFDRLHRDFINEALAKVNLDCSHYWELFQAKDKKALQIEADKLRKNFGTAFNLVGRQWSKLAGIKEENEENEGNKDQSKYRDILFKKEVLDIIKARYGQGDARLAALLETFKNFFTYFINFNESRKNFYKLDGTSTAIATRSIDVNLKIFCSNIANVQYLPDGIQLTDEERSLFEIRNYQTFLQQEKIKQYNDLIGTINGKINNYRQANHQKIGFLKILQKQILGDANNPSTKFIEITDDASVFPVLNELINNAEEPFRKFYKELLPKILPDTTDNSIDLSKVYLSKVALNTISSKVCQSWCTLKDILEKKNDFSLDNVLTSLKNNQQQAKEIFRDDVLKNFLADSNDKIFKKWLYNEYQKSYERYCAAKDVLLCKMEQDKSFRKEDQEQKNIIKEFCDAALEVYRMIKYFYIDRSQNSVEVDPIFYNILDPILDDCSVYQYYNEIRNYLTKKPFSQDKIKLNFGNGQLLQGWDENKLKDYKGAILRHGDDYYLGILMGNQVFQTNNKEAYLDNTNGHGWELMIYKQIADAQKDVPRLFFAKANLALFQPSDNIKRIKDSKSYLRSSDNFSSQDLYDLIDYYKSCIEKYPNWQCYDFHFLPTEEYKNMKDFTDDIQSCAYKVKFVPVRDQYIKEQQSQKQSQKQSQVGLLLFKITNRDFLPQAHGCDNLHTKYFRALFDQENLQHPVIKLNGGAEIFFRQASITPKLVERGQKCIIENRRYTEDKYLFHFPITLNVNHKITPRAFRAKINNLLYTNPNINIIGIDRGENHLLYISVVNQKGEILDGPRPLDTVNGIDYLGLLEKVSKDRDRARKNWESIAKIKDLKAGYVGQVVKVIADLALQYNAIVVLEDLNTGFKRSRQKIEKQIYQNFELALINKLNYFVKKEAMPGEKGHFLSAFQLTEPITSYQDVGKQTGIIFYVPADYTSITCPQCGFHKSFNFYHKNKTEDEHLLKTMDLRYDNDDECFKLTCNLMALSNNKKQDNNELELSSKNIQRWRWGTNKRELVSYDITKCLAELFSKLQINYTQERGNLLNLFISQQPTSQDYDALIFYLQLWQKIRNSSPTSPDYIQCPHCGFHSDNGFRGKEWNGDANGSYNIARKGILILGKIKQFGDNHHDRDQEHIFDDLKWSDLSINTEEWNEYVGRQ

SEQ ID NO: 68 - protein, 1254 aa, unidentified
  REGION 1..1254: note = Sequence from GenBank assembly GCA_002316175.1
MKFEDFTGLYPVSKTLRFEARPVGDTLKNIIKRGILEQDTHRAESYQKVKKLMDEYHKAFIDSVMSNFRFSCEDLEEYFVLYANKSDNDESKNKYTELQKKMRESVSKALKGDERFKKINKKELIKEDLYAFIREAGESQLVGLTREQAEELLLEFKDFSTYFGGFYQNRANMYVPDEKSTSIAYRLVNENLPRFVDNIDVFNKITSIPELRDNVKTIYDAFKEYLNVVELSNIFDVTFYSEVLTQKHIDLYNSIIGGRTDNESSKKIHGLNEYINLYNQTHKDEKLPKFKVLYKQILSDRVAVSWLPEAFSNDKETLCAIRDCYSGLEEHILGEKDLKILLESLDKFDLCGVFISNNKQLLSEISQKLYGNWKTIENAVRRHFEETSPQNVKKENEEKYRERISKIIKRYESFSIADLNEWVKKSDPDESRRIEDYFASLGVVNSENEQKEDLFSRVANVYIDVADLLFSDYPDGKRLAQDSKDVEKIKNLLDAIKELQWFVKPLNGSGDENNKDERFYGEFSMLWAELESFSLLYDKVRNYMTKKTYSQDKIKLNFANATLLKGWDRNKEVDNACVILRRNGLYYLGIMDKKYRRSFEGNYLCEGDVYEKMVYKLLPDPKKMLPKVFFSKSREKDFNPSDSILRIHKGETYKAGPQFKIEDCRELIDFYKKSISLHEDWKNFGFEFSDTSTYDDLNGFYREVEQQGYKITFKNVSVSYVEKLVGEGKLYLFQLYNKDFSSYSKGTPNIHTLYWKALFDEKNLLNVVYKLNGEAELFFRKKSINITNPTHPANVSVANKNKLNQKRESLFDYDLIKDRRYTIDKFLFHVPITMNFKSKGRPQIEQLVRGYLHSAENTHIIGIDRGERHLLYVSVIDSHGNIKEQFSLNEIINENAGNVYVTDYHALLDTKETERKEARQSWQTIENIKELKEGYLSQAVHKVTQLMIKYNAVIVLEDLNMGFMRGRQKVEKQVYQKFEKMLIDKLNYLVDKKVCVDAPGGVFHAYQLTSKFESFAKLGKQSGFLFYIPAWNTSKIDPITGFVNLFELKCDSIDRTKLFFSKFKSIRYNQRSDWFEFAFDYNDFTSKAAGTKTEWIITTHGTRIINFRNPQKNNQWDSNEVVLTDEFKSLFARYSIDFSGNLKEGITMQTDKSFFEGLLNYFKLTLQMRNSVTGTDVDYLISPVADGNGMFYDSRNCADSLPKNADANGAYNIARKGLMLIKQIKMSNDFKTVKLDITNKAWLEFAQKKPYLND

SEQ ID NO: 69 - protein, 826 aa, unidentified
  source 1..826: note = Candidatus Magasanikbacteria
MDSALAVNRILKYFFVKESKAKGEQIDPIISEALKVLFNSEDATWFKWYDALRNYLTKKPQDDVKENKLKLNFENSTLAGGWDINKESDNYCVILQDQKGKQHLGIIAKKEKQRGYNKIFERTPENPLYKIDSGEVWQKMEYKQIAVPTGIGGFVRKCFNTAQQYGWKCPDNCLNSEGKIIIKNDEAKENLEAIIDCYKDFFTKYEKDGFKYKNFNFNFKESEEYEELNSFFSDVERQGYKLGFITVNKTIIDKWVEDGTIYLFEIKNQDTNDGKKDGHKNNLHTIYWKALFEDVGNKPKLNGGAELFYRKALLKDKQEKIEDNYGKEIIKNFRFSKEKFLFHCPIKLNYKAKSYSHPKYALPEINKQTNEFFITISDICFLGIDRGEKHLAYYSLVNQKEEIIDQGTLNMPFVDKDGKPRSIKKEKFRFDAKVDKWVSEEMDCWNYNDLLDAMASNRDMARKNWQTIGTIKELKNGYISQVVRKIVDLAIDKNRGIPSFIVLENLNAGFMRGRQKIEKSVYQKLELALAKKLNFVVDKTVQNGEIGSVTNALQLTPPVTNFQNIENRKQVGIMLYTRADYTSQTDPVTGWRKSIYLKKGSEEYIKSQIMDSFDDFGFDGKNYYFKYTVDLIDPIKKTSEKKFKKQWTLYSGINGKSLDRFRGERSSDKNVWIKTLQDIKTTLDAVFIGFDLQHSLRSQIINDGIMPKKIENSQFTGWESLRFAIEMIQQIRNIGVEKGDEDFILSPVRDKNENHFDSRKAKENEPNSGDANGAYNIARKGIIMNEHIKKDLIPFIQDKEWDAWLAGREVWDKWLIENKDSLIYKK

SEQ ID NO: 70 - protein, 784 aa, unidentified
  REGION 1..784: note = Sequence from GenBank assembly GCA_002333425.1
MLTALLHADDADWFGWYDAVRNYLTKKPQDDAKKNKLKLNFFNPNLLGGWSDGEEKNKGAVLLKNGHKHYVGLLIDRNIFDTKKKNISIYNSSNKDTGRLILRNIAFKTLAGKGFNGMFKVKYGDIGKTNPLEAVQKLQEFIKSYIIKKDKITYAQKYPSLKSVLEKKYNDKKIFDKEIQEILRDCYENDFTPIDWNTVLKFVEEKKMYLFEVYSKDFSTTKGDKSNNSNLNLQTIYWQNVFQENSTIQLCGGGEIFFREKATDKKIVHPANELIYRRSDGQTASKFKHDIIKDKRFTAEKYSFHIPIKINYQAPVSGIREGRPNPPAFNAVQQAVNNHFTQADDIQFLGIDRGEKHLIYYSLVNAKGEIQKQGDLDVIKNKDYLKEINEAAKIRRQKQENWQQKGNISNLKDGYISLVVHEIIEKMKDENGKFKPTFIVLEDLNSGFKRGRQKFEQQVYQKFELALAKKLNFVVDKKAPMGEIGSVAKALQLTPPITNYQDIEGKKQIGIMLYTRANYTSVTDPVTGWRKTIYLKTGSEGFIKEKILEAFTEISVDEHGDYFFQYKDRNTEKIWTLWSSKNGKPLERYRAKRSKDKNKYEVESIDVKEILDKLFADFNKNDSLIKQLREDKELLKVNEHTAWESLRFVIDTLQQIRNSGDTNKKQENKFFGADESKNQDDNFLLSPIRNESGEHFDSRIFEKQKDPKLPKDADANGAYNIARKGIIMYEHIKQWVVEGKEKSDLDLFISDEEWDLWTVDREQWKQKLKVFASQKAKKENAKRS

SEQ ID NO: 71 - protein, 816 aa, unidentified
  REGION 1..816: note = Sequence from GenBank assembly GCA_002342585.1
MTLGAVNTEATQKENFFAQIENAYEDARTILQIKDTGDTLSQNKSAVAKIKALLDALKDLQHFIKPLLGSGEENEKDELFYGSFQMMWDELDTVTSLYNKVRNWLTRKPFSTEKIKLNFDNSQLLGGWDVNKEPDCKGILLRKDDFYYLGIMDKKSNRIFEADVTPTDGECYDKIDYKLLPGANKMLPKVFFSKSRIDEFAPSEAIVSSYKRGTHKKGAVFNLADCHRLIDFFKQSINKHEDWSKFGFHFSDTKSYEDISGFYREVEQQGYMLSSHPVSSSYIDTLVSEGKLYLFRIWNKDFSESSKGTPNLHTLYWKMLFDERNLVDVVYKLNGQAEVFYRKASIKPENCIIHKANQPIANKNELNTKRASTFKYDIIKDKRYTVDKFQFHVPITINFKAAGQNNINPIVQEAIKQDEFSHIIGIDRGERHLLYLSLIDLKGNIVKQMTLNEIINEYKGQTYKTNYHDLLAKREGDRTEARRSWETIETIKELKEGYLSQVVHIISKMMVEYNAIVVLEDLNTGFMRGRQKIERQVYEKFEKMLIDKLNCYIDKQLSPTDEGGLLHPLQLTCDAQKWKRSHQCGCLFYIPAWNTSKIDPVTGFVNLLDTHYDTREKARVFFSKFQRISYNAPKGWFEFAFDYNDFTTKAKGTRTQWTLCTQGERIRTFRNPQKNHQWDDERIMLTDAYKQLFDKYDIDINGNIKEAISSQTDAQFFKDLMGLMKLLLQMRNSITNSEEDYLLSPVANGTGHFFDSREGISSLPKDADANGAYNIARKGLWVVQKIQETPEGEKPSLTITNKEWLQFAQTKPYLND

SEQ ID NO: 72 - protein, 1271 aa, unidentified
  REGION 1..1271: note = Sequence from GenBank assembly GCA_002350355.1
NMKRKFDDFIHLYSLSKTLRFEASPIGDTLRNFKKNGLLERDKHRAESYVKVKKLIDEYHKVFIDRVLNGSVLNYVNKGKYDSLTEYYDLYSVPKKDETSQKHFKAIQQHLRQQIVKKFTDDKNYKRLFGKELLESYKDKEDKKKLNEADLVQFINAANPEQLLSLSKKEAIDLVQEFSGFTTYFNEFHKNRKNMYSAEEKSTGIAYRLINENLPKFIDNMKSFKKIVDIPEMKDNLKQIHEYFVDYLNVENIHEMFQLDYYNQLLTQKQIDVYNAIIGGKTDNEHKEKIKGINEYVNLYNQTHKDAKLPKLKVLFKQILSDRNAISWLPEEFKDDQEVLNAIKDCYARLSKNVLGDNILKELLCSLAEYDTKGIFLRNDLQLTDISQKMFGNWSVIPSAIKKDVAPAKKRKELEEDYEKRIDNLFKKRESFSIDYIDSCLDKFDENNTHTIEGYFATLGAVDTPTTQRENIFAQIANTYTDLEPLLKSPYSKNKNLSQDKDNVAKIKLFLDALMSLMHFVKPLLGKGDESNKDEKFYGDFTLLWTELETVVPLYNMVRNYMTRKPYSKSKIKLNFDNSQLLGGWDANKESDYASILLRRDGKYYLAIMDKDSKKLLGKSMPSDGECYEKMVYKLLPGANKMLPKVFFATSRIKDFKPSEQLLENYNKGTHKKGVNFSISDCHALIDYFKQSINKHEDWKNFNFNFSETSTYEDLSAFYREVEQQGYKITFTNVSVSFIDKLVEEGKMYLFQIYNKDFSEYSKGTPNMHTLYWKALFDERNLKDVVYKLNGQAEMFFREKSIKVSTIHPANRPIQNKNKDNKKKESIFEYDLIKDRRYTVDKFMFHVPITMNFKSADTENINLPVREYLQTSDDTHIIGIDRGERHLLYLVVIDLQGNIVEQYTLNDIVNEYNGNTYRTNYHDLLNAREAERLKARQSWQTIENIKELKEGYLSQVIHKITQLMIKYHAIVVLEDLNKGFIRGRQKVEKQVYQKFEKMLIDKLNYLVDKKADIETTGGLLNAYQLTSKFESFQKLGKQSGFLFYIPAWNTSKIDPVTGFVNRLDTRYHNVDKSKAFFAKFDSIRYNKEKDWFEFALDYKNFGNKAEGTRTKWTLCTQGKRIKTFRNAEKNSNWDYQIIDLTKELKQLFAHYDIDINGNLKKAISNQTEKTFFVELMQFLKLTLQMRNSITNTETDYLVSPVADENGNFYDSRKCGSSLPENADANGAFNIARKGLMIIEQIKASDDLSKLKFDISNKSWLNFAQQKPYKHE

SEQ ID NO: 73 - protein, 941 aa, unidentified
  REGION 1..941: note = Sequence from GenBank assembly GCA_002352545.1
MKSDKPAGLKYDKKENNYKFPDFIAVSYIKDALENFSGEQKFWKDRYYIELELDNQVVWKQFLDIFYWEFSSLFKRSFVNKETGEISEVGCDIFEKKFINLIDDFEYNQKSKILIKDFADSVLSVYQMANYFSLEKKRKWSTEFETDSKFYDDSEIGFRNCFYEDVFEGIVQVYNKLRNYLTKKPFSEEKWKLNFENPTLAAGWDKNKEKDNSTVILRKDEKYFLAIMKKGNNVIFDDRNKALFSQNLEHGKYEKVVYKFAKDVTLGIPKSTTQTKSVIAHFKNSDEDYQITNGSAVGDFLEPLVVTKRIFELNNKIYSKNNLGKVLYRSEVSKDKQKEYIKLFQKKYLVLGGNKNLYRDAVKEWIDFCKSFIKVYPSYKYFDFSLLKEAVEYNSVDEFYKELNSYGYAISFQDISCDYIEEKNKNGELYLFQIKNKDWNKGSTGMKNLHTLYFESLFSEENIKNNFVTKLNGGAEIFYRPKTSKEKLGRKKIVRNGQEVFVVNHKRYSEDKIFFHCSIALNRGKGKLLKFNARINDLLANNPDINVIGVDRGEKHLAYYSIIDQKCKILDSGTLNEVGAKVDYHEKLSNRAKKREDGRRDWGWGQIEDIKNLKKGYVSQVVHKLAELIIKYNAILVFEDLNMRFKQIRGGIEKSIYQQLEKALIDKLNFLVKKGEKDSKSAGHLLKAYQLAAPFETFDKMGKQTGVIFYTQASYTSKIDPITGWRPNLYLKHSNANDSQKKIAKFSRIEFINDRFEFEYDLKKFIEMKEVPENTKWTLCSCVQRYRWNRKLNANKGGYDSYNDLTKNFKALFESVGIDIKKNIKEQIVKMEIKGNEKFFKSFIFYWQLLCQIRNTDELKKGDDNDFILSPVEPFFDSRKKNGDDLPKNGDDNGAYNIARKGVIVLNKISEFSKQNGNCEKCGWKELYVSAKDWDDFVQAK

SEQ ID NO: 74 - protein, 1311 aa, unidentified
  REGION 1..1311: note = Sequence from GenBank assembly GCA_002353655.1
MVNYEDFTKQYQVSKTLRFSLIPINETLENIKKEGFLEKDESRSDDYQEVKPILDKIYKEFADKALDHLSVNWKPLADAIEKYRISKTLQDREELRKIQEKIRKEIAGLFKGVHGNTVDEKQESLFKDIFSKKMFDGKVLERIDSIVLSAEEEKLLQKFTSFTTYFTGFYENRRNVFSDDDISTAIPHRIVQDNFPKFFENCKTYSRIKNQFPQLLDLLEKAKENLGILPEVSLDEMFSLQFYNHVVQQKNIDAYNQILGGIAGEAGEKKLQGLNETINLMMQQDGELKKALQNVPHRFIPLFKQILSDRTSLSFISDSFETDAELLDALKHLDEEVQTAAVAEKVKTLFIHWTDFNLAQIYISNSSLDKLSNAVYGQWDFIRNQLYMSQLNKKAAANGKVSQKEEGKIRSWIKNHDFSLTELRLDADPEIVEKCSAVLKEAAENFVKISRMALPSQLLKDNEREEIRNHLDGYMDFLHILEWFDVDLADEVDPMFLVPYEEIMAEMRPVPAFYNKVRNYVTKKPYSTEKYKLTFSIPTLADGWDNNKEKDNRTVIFMKDDKYYLGIMKKGNEIHFPPAGEDAAYFKMNYRFFPSVSKMIPKCSTQRKDVKAHFGKESSDMIIEDQQFNSPLVITKEIYDLNNVQNDEKKKFQKSYLDKTGDEKGYRDALKKWIDFSKEFLKKYESTSHFDYSSVRPTSEYDSLNDFYNDLNHLSYCVAFDKVSETAVNQMVADGKLFLFQIYNKDFAPGHTGRPNLHTMYWKAIFSDENLKYPRIKLNGQAELFYRPKSKMEVVRHRVGEKLVNKKMKDGRTPVPELIYEEVYKYVNGKLKGNLSSEAQALLPDIEIRDVKHEIIKDRRYARDQFFFHVPITLNFQSERKVQKFNDQVTDYLKDHPETPVIGIDRGERNLLYLVVIDGNGKILEQRSLNLINGYDYHEKLADRERERTKARQSWTTIGKIKDLKQGYLSQAIHEITCLMVKYHAIVVLENLNFGFMSKRTGIAEKAVYQQFEKMLIDKLNCLVLKEAELDEPGSVLNPYQLTDQFSSFAKMGNQSGFLFYVPAAYTSKIDPMTGFVDPFSWKAIKTDADRREFLEGFSSLCYDAGKDRFILHMEMKNNQKYQRKLTGFMPDWDIVFESNVERQNPSGESYRAGKRIIAEFANHRRTGQYKEVYPCTELKQILSENDISYNHQEDLLQQVLNKKDPKLNRLLVELIREVFQMRNSCAAANGHDEEDYISSPVAAVNDQCFDSREGLKEMPVDADANGAYHIAMKGKLLLERLRDTDNKKSKNKKMQISNNDWLQYIQQMRN

SEQ ID NO: 75 - protein, 1275 aa, unidentified
  REGION 1..1275: note = Sequence from GenBank assembly GCA_002367195.1
MKKENIFENFTHQYSLSKTLRFELIPTEETKRFLEKNEIIKKDAVIDESYHKAKPYFDSLHREFIKESLDPERSLLSFGNFERSWNDFQKDKKSNKKNLLAQKKLLYKDIAKLFDDYVNTWKKQYAPETKNSGTKLLYSADTLSILKKRFPKDSENEKLFIKDEHGNDRYIFDSFDRFTTYLTKFQATRENLYKNDGTSTAVATRIVENLSFFLANKSKFEKFLAYKDILKLTDQEKESSKTEYYMRCMTQPGIEKYNALVGDLNARMKTLRDTAGKDAKKSDYPLLKKLYNQILAEKKIESDKVFDIESNEEVPVRMHEFYEEVERVSTIAKELVTILAQGGFENEYGGIYLHNRAINTIARKWFVSAYEFENCLPQKGKKKEGSVRVAPFVSFAEIKDALGEKLAEDLLKEKLFEEKAYRLVKRTLAYSQFLALFAKDLEILLNEYNEKKNNFSKKDLRIFERGENDENVDALKDALDAGLHIVQFMKYFVLSSKKADDKPTHTSAEFYNHYDELYGDPDQKHDIVRYYDAFRNFLTKKPADQKKIKLNFENGALLTGFDKDKESEKLGIILRKNSIYYLGIINKEHNKIFDDKKHQDAFDVVDATSYEKMEYKLFPDPKRMVPKIAFAKKNRERFGWTQEIQDIKDEYARFQDDRGDRSNWSKQFDKIKLTKLIAYYQHALDRGGYKNTFDFQWNNPVDYSGIGEFNDHLTSQNYKIGFRQVRQRYIDDKVAQGELYLFKIHNKDFGEKSKGTQNTHTLYFLNLFSQHNLTHIKLRLAGNAEVFYRKSSTQRKEEQRKFIRPIVKNKRFTEDKYFFHIPIKIGASVNSISETKFNRTLNEKLRQSACLIIGIDRGEKHLAYYSVINQKGEIVDQASLNKINDVDYCEKLRTREKERLEQRKSWKAISQIKDLKRGYISQVIHKLSELVIKHNAIIVFEDLNMRFKEVRGGIERSAYQQLEKALIEKFGYLVFKDKDPLEAGGVLNGYQLSAPFESFEKMGKQNGVIFYTNPEYTSTTDPVTGWRQHIYIKSDATDNEALKVFTEKIGIGWSDDKQSYTFSYDQKDFWEDSPARKWVLYANAPRLERYRNDAGYWTTRETNSNDLLRELFEVWDFDQPEGDISEQIAMMYEEGKLKGEKIISEKSQRFFKALRYALNLTQQIRNSDSIRYVYERDAQGDIVEDSQGKMVVKEIGENVDFIASPVVPFFTTPNPYTKENLCGLVIENGDANGAYNIARKGIMMLERIKQTQANPDLYISKSDWDEWLMKDIKQK

SEQ ID NO: 76 - protein, 1253 aa, unidentified
  REGION 1..1253: note = Sequence from GenBank assembly GCA_002368815.1
MNAFNQFTNLYPVSKTLRFELQPIGKTKENIEKNGILARDEQRAKDYLLVKDLIDEYHKQFIKERLWDFKLPLKSEGNLDSLQEYQEIYELSKRDDAQEAAFTEIKDNLRSIIAKRLTESGSAYERIFKKELIREDLVYFLENEEDKEIVRQFADFTTYFTGFHENRKNMYSAEEKSTAIAYRLIHQNLPKFMDNMKVFAKIAETSVAEHFADIYDGWKEYLNVGSIEEIFRLDYFSDTLTQTNIEVYNYIIGKKILEDGTEIKGINEYVNLYNQQQKDKSLRLPFLVPLYKQILSDREKLSWITEEIDSDEQMLSAINESYNHLHDLLMGKENDSLRSLLLHIKDFNLSQINITNDLSLTDISQHLFNRYDVFTNGIKDKLRIITPRKKKESDEDFEDRISKIFKTQKSFSVAFLDKLPQPVMDDGKPRSVEDYFMSLGAVNTETTQKENLFAQIENAYEDAHPILQMRETGDTLSQNKTAVAKIKALLDSLKDIQRFIKPLLGSGEENEKEELFYGVFQLIWDELDTVTPLYNKVRNWLTRKPYSTEKIKLNFDNAQLLGGWDVNKEPDCTGVILRHDGFYYLGIMNKKSNHIFDAELTPSDGECYDKIDYKLLPGANKMLPKVFFSKSRIDEFAPSESIVNSYKRGTHKKGADFSLSDCHKLIDFFKSSIAKHEDWSKFGFHFSDTKTYEDISGFYREVEQQGYMLSSHPVSTSYIHQMVDEGKLYLFRIWNKDFSEFSKGTPNLHTLYWKMLFDERNLADVVYKLNGQAEVFFRKASIKPENRIIHPSNHPIANKNELNKKRTSTFEYDIIKDRRYTVDKFQFHVPITIGFKATGQTNINPLVQDTIRRGGFTHIIGIDRGERHLLYLSLIDLKGNIVKQMTLNDIINEYKGVTYKTNYRDLLAKREGDRTNARRSWDTIETIKELKEGYLSQVIHVISKMMVEYNAIVVLEDLNQGFMRGRQKIEKQVYEKFEKMLIDKLNCYIDKHSEPYSVGGILRPLQLTNKFESFRKLGKQSGCLFYIPAWNTSKIDPVTGFVNLFDTRYDTREKARLFFSKFQRINFNAEKGWFEFVFDYNDFTTKAEGTRTKWNLCTYGERIRTFRNPQKNNQWDNERIVLTDAFKQLLTKYNIDIHGNLKESISAQSDAQFFKELLGLMKLLLQMRNSITNSEEDYLLSPVADDSGRFFDSRDNIETLPNNADANGAYNIARKGLWIIMQIEQANELQKLKLAVSNKEWLQFAQTKPYLND

SEQ ID NO: 77 - protein, 1224 aa, unidentified
  REGION 1..1224: note = Sequence from GenBank assembly GCA_002371595.1
MKKIDNFVGCYPVSKTLRFKAIPIGKTQENIEKKRLVEEDEVRAKDYKAVKKLIDRYHREFIEGVLDNVKLDGLEEYYMLFNKSDREESDNKKIEIMEERFRRVISKSFKNNEEYKKIFSKKIIEEILPNYIKDEEEKELVKGFKGFYTAFVGYAQNRENMYSDEKKSTAISYRIVNENMPRFITNIKVFEKAKSILDVDKINEINEYILNNDYYVDDFFNIDFFNYVLNQKGIDIYNAIIGGIVTGDGRKIQGLNECINLYNQENKKIRLPQFKPLYKQILSESESMSFYIDEIESDDMLIDMLKESLQIDSTINNAIDDLKVLFNNIFDYDLSGIFINNGLPITTISNDVYGQWSTISDGWNERYDVLSNAKDKESEKYFEKRRKEYKKVKSFSISDLQELGGKDLSICKKINEIISEMIDDYKSKIEEIQYLFDIKELEKPLVTDLNKIELIKNSLDGLKRIERYVIPFLGTGKEQNRDEVFYGYFIKCIDAIKEIDGVYNKTRNYLTKKPYSKDKFKLYFENPQLMGGWDRNKESDYRSTLLRKNGKYYVAIIDKSSSNCMMNIEEDENDNYEKINYKLLPGPNKMLPKVFFSKKNREYFAPSKEIERIYSTGTFKKDTNFVKKDCENLITFYKDSLDRHEDWSKSFDFSFKESSAYRDISEFYRDVEKQGYRVSFDLLSSNAVNTLVEEGKLYLFQLYNKDFSEKSHGIPNLHTMYFRSLFDDNNKGNIRLNGGAEMFMRRASLNKQDVTVHKANQPIKNKNLLNPKKTTTLPYDVYKDKRFTEDQYEVHIPITMNKVPNNPYKINHMVREQLVKDDNPYVIGIDRGERNLIYVVVVDGQGHIVEQLSLNEIINENNGISIRTDYHTLLDAKERERDESRKQWKQIENIKELKEGYISQVVHKICELVEKYDAVIALEDLNSGFKNSRVKVEKQVYQKFEKMLITKLNYMVDKKKDYNKPGGVLNGYQLTTQFESFSKMGTQNGIMFYIPAWLTSKMDPTTGFVDLLKPKYKNKADAQKFFSQFDSIRYDNQEDAFVFKVNYTKFPRTDADYNKEWEIYTNGERIRVFRNPKKNNEYDYETVNVSERMKELFDSYDLLYDKGELKETICEMEESKFFEELIKLFRLTLQMRNSISGRTDVDYLISPVKNSNGYFYNSNDYKKEGAKYPKDADANGAYNIARKVLWAIEQFKMADEDKLDKTKISIKNQEWLEYAQTHCE

SEQ ID NO: 78 - protein, 1221 aa, unidentified
  REGION 1..1221: note = Sequence from GenBank assembly GCA_002371615.1
MRKIDSFINLYSVSKTLRFKAIPVGKTQENIDIKRLIEEDEERAEKYKKAKKIIDRYHIAFIDRVLDKLELSDLTDYVVLYNKRDKSDDDKNKMTEYEASFRKQIADSFKQDKEYKQLFEKALIEDLLPKKLTDDVEKAIIKSFVGFKTAFEGFNQNRANIYSEEEKSTSIGYRCINENLPRFISNLNCFEKIRQALGEDTITRLTKELELDPYSAEECFAIGFFNNVLSNKGIVFYNTVIGGLVTKDGEKIKGLNEYINLYNQQNKGTKLPLLKPLYKQVLSEYEGLSYRSEEYKNTQEMISEIYDVAGENSGIFGALEKTRKLFEKIETYNLSGIYVANGPFITEISKRITGDWANFRDNWSRNYDSNYSGRVPQGSEKYEENRKKDYQKTESFSLVEIAEFLYTEDEDYSINSITAMFKQRIQDLINDIKNSYDALKDLFASDFNDMLGKESVYNIKMYLDLLKDLEKELKSVQGSGKETGRDEVFYGELTEIVDSILKMDSLYNRVRNFVTKKPYSTDKFKLYFENPQFLGGWDRNKVSDYRATILRNEGIYYIAIIDKSNSKILEGIEETNVDECYEVLDYKLIPGASKQLPHIFFSGKGREKFNPSEEVLHAYETGSYKKSSKTFNKADCHKVIDYYKEAITHYEWNSVFDFRFSDTDRYDDISGFFHEVDAQGYKLSFYKASKSKIDALVESGSIYLFKLYNKDFSPNRHGTDNLHTMIFKQMFCESNGGSIKLCGGAELFYRKASINKENMIVHEANKSIKNKNPLNEKKESVFKYDLIKDRRYTEDQYEIHIPIQLNRTPLGIQKLNDEVRKKLASDSNPYIIGIDRGERNLIYICVIDGKGNIVEQHSLNEIVNEYKGISIRTDYNNLLSRKQEERQRSRQDWSGVENIKELKAGYISQVVHKICSLVIKYDAIIAMEDLNSGFKNSRIKVEKQVYQKFEKALIDKLNYLSDKGIEIGENGSVTRAFQLANPFKSFRSMGTQNGFIFYIPAWLTSKIDPVTGFVDLIKPKYVSITEAQSFIKSFDGIRYNNNEDMFEFDIDYKKFPRSDAAYKKKWTAYTNGTRIKTFRNPKKNGEWDNEEVILSREFKKLFDRYEIKYSELDMREDLCRQSNKQFYVEFISLVRLMLQMRNSITGRMDVDYILSPVKDDGGNFYDSRYAGKSLPQDADANGAYNIARKALWAIEQIKESDDVSKVKLSISNKEWLEFVQK

SEQ ID NO: 79 - protein, 1367 aa, unidentified
  REGION 1..1367: note = Sequence from GenBank assembly GCA_002372885.1
MEKSLNDFIGLYSVSKTLRFELKPVSETLENIKKFHFLEEDKKKANDYKDVKKIIDNYHKYFIDDVLKNASFNWKKLEEAIREYNKNKSDDSALVAEQKKLGDAILKLFTSDKRYKALTAATPKELFESILPDWFGEQCNQDLNKAALKTFQKFTSYFTGFQENRKNVYSAEAIPTAVPYRIVNDNFPKFLQNVLIFKTIQEKCPQIIDEVEKELSSYLGKEKLAGIFTLESFNKYLGQGGKENQRGIDFYNQIIGGVVEKEGGINLRGVNQFLNLYWQQHPDFTKEDRRIKMVPLYKQILSDRSSLSFKIESIENDEELKNALLECADKLELKNDEKKSIFEEVCDLFSSVKNLDLSGIYINRKDINSVSRILTGDWSWLQSRMNVYAEEKFTTKAEKARWQKSLDDEGENKSKGFYSLTDLNEVLEYSSENVAETDIRITDYFEHRCRYYVDKETEMFVQGSELVALSLQEMCDDILKKRKAMNTVLENLSSENKLREKTDDVAVIKEYLDAVQELLHRIKPLKVNGVGDSTFYSVYDSIYSALSEVISVYNKTRNYITKKAASPEKYKLNFDNPTLADGWDLNKEQANTSVILRKDGMFYLGIMNPKNKPKFAEKYDCGNESCYEKMIYKQFDATKQIPKCSTQKKEVQKYFLSGATEPYILNDKKSFKSELIITKDIWFMNNHVWDGEKFVPKRDNETRPKKFQIGYFKQTGDFDGYKNALSNWISFCKNFLQSYLSATVYDYNFKNSEEYEGLDEFYNYLNATCYKLNFINIPETEINKMVSEGKLYLFQIYNKDFASGSTGMPNMHTLYWKNLFSDENLKNVCLKLNGEAELFYRPAGIKEPVIHKEGSYLVNRTTEDGESIPEKIYFEIYKNANGKLEKLSDEAQNYISNHEVVIKKAGHEIIKDRHYTEPKFLFHVPLTINFKASGNSYSINENVRKFLKNNPDVNIIGLDRGERHLIYLSLINQKGEIIKQFTFNEVERNKNGRTIKVNYHEKLDQREKERDAARKSWQAIGKIAELKEGYLSAVIHQLTKLMVEYNAVVVMEDLNFGFKRGRFHVEKQVYQKFEHILIDKSNYLVFKDRGLNEPGGVLNGYQIAGQFESFQKLGKQSGMLFYVPAGYTSKIDPKTGFVSMMNFKDLTNVHKKRDFFSKFDNIHYDEANGSFVFTFDYKKFDGKAKEEMKLTKWSVYSRDKRIVYFAKTKSYEDVLPTEKLQKIFESNGIDYKSGNNIQDSVMAIGADLKEGAKPSKEISDFWDGLLSNFKLILQMRNSNARTGEDYIISPVMADDGTFFDSREEFKKGEDAKLPLDADANGAYHIALKGLSLINKINLSKDEELKKFDMKISNADWFKFAQEKNYAK

SEQ ID NO: 80 - protein, 1371 aa, unidentified
  REGION 1..1371: note = Sequence from GenBank assembly GCA_002373205.1
MNKNFSNFTELYTLSKTLRFELKPVAQTKENIKKGKFLESDKKKADDYKDVKKIIDNYHKFFIDDVLKNASFDWTVLEKEMSDFNKSKADDSKVEAEQKKLRDQIAKKLTSDKRFKALTASTPSDLFNKDKDFIDWFTQNSTKDINKEALETFKRFSSYFKGFQENRKNVYSAEPIPTAVPYRLVNDNFPKFLQNIALFKIIQEKCPQVISDVEKELASYLGKEKLADIFTVQAFNKYLCQGGKENQRGIDFYNNILGGIAEKEGGINLRGINQFLNLYWQQHQDFAKQNKRIKMIPLFKQILSDRSSLSFKIESINTDQELLTSITEYADKLETKSNDEKKSVLDICSDLFASIKAQNLQEIYVNRKDINSISRILTGDWSWLQSRMNVYADEVFTTKAEKTRWQKSIDGDEGENKSKGVFSLAELNSVLEYSSENVSETDVRITDFFDHRNRFYYEKESGLFKQGDELVALSIRESCEDILAKRKAMDEAFANVSENNSLRDNSEDVAKIKIYLDCVQELLHRIKPLKVNGLGDPAFYAVFDTVYNSLSEVISLYNKTRNYITKKAANPEKYKLNFDNPTLADGWDLNKEQANTSVLMRKDGMYYLGIMNPKDKPKFAEKYECGNEACYEKMIYKQFDATKQIPKCSTQVKEVKKHFQSGATDSIILNDKSKFKLDLVITKEIWFLNNHVWNGEKFVPKRESNETRPKKFQIGYYKQTGDLGGYKEALNIWISFCKTFLQSYISSSIYDYDFKESSNYDSLDEFYNYLNATCYKLSFINIPEATISQMVSEGKLYLFQIYNKDFAPGASGMPNMHTLYWKNLFSEENLKNVVLKLNGEAELFYRPAGIKEPVIHAKGSYLVNRITKDGEPIPEKIHDEIYRNANGKLESLSKEATEYKASHKVVIKEAKHDIIKDRHYTEPKFLFHVPLTINFKASGNSYINENVRRFLKNNPDVNVIGLDRGERHLIYLSLINQKGEIIKQFTFNEVERNKNGQVIKVNYHEKLDQREKVRGAARKSWQAIGKIAELKEGYLSAVIHQLTKLMVEYNAIVVMEDLNFGFKRGRFHVEKQVYQKFEHMLIDKLNYLVFKDRGLTEAGGVLNGYQLAGQFESFQKLGKQSGMLFYVPAGYTSKIDPKTGFASMSNFKDLTNVHKKRAFFSKFDDIHFDDATGSFVFTFDYKNFDGKAKEEMKRTKWSVYSKDKRIVYLSKTKSYEDVQPTEKIKASLESVGIEYMSGNNLIDSIMVIGAELKDGAKPSKEIADFWDRLLYNFKLILQMRNSNAKTGEDYIISPVMADDGTFFDSREEFKKGENAKMPVDADANGAYHIALKGLSLLKRFDAASENELKKFDMKISNVDWFKFAQEKSYAE

SEQ ID NO: 81 - protein, 1251 aa, unidentified
  REGION 1..1251: note = Sequence from GenBank assembly GCA_002375165.1
MKDLKRFIGIYPVSKTLRFELRPVGKTLEWIEKNKVLESDEQKAEDYPKVKTLIDEYHKVCIRESLKDAHFDWMPLRLALEKYQKSKSDEDKAALEKEQAVMRKQIATAIKEFRHYKELTAPTPQKLIDNVFPGIYESDALKSFNRFSVYFRGFQENRNNIYSAEAISTGVPYRLVHDNFPKFLADIEVFGNIKANCPEVIEQAATELQPILEGVMLEDIFTIDFYNSLLTQDGIDFFNQVLGGTAEEDKQKYRGINEFSNLYRQQHPELTAKKKALTMIPLFKQILSDRDTLSYIPQQIESEQQLIELLNQFYSHITAFDHNGKTVDVLKELTKLTGNINNYNPDGIYLSAKSLTDVSQKLFSKWNIITERLSEEAIKRFGDVSITKNKKKIDAYLSKDAYALSEIPLDNEHSLSMFFAELPKNIENVGSNWLQFMEWCKGESKQLFLNNADGTEIVKNFLDSIMEILHRCSVLVVSVEHDLDKDFYNDFLPLYAELENAVMVYNRVRNFLTKKPSDTKKFKLNFGVPSLGDGWDQNKERDNKAIILFKDGKSYLGIMNAKDMPMIKERNESTPSSYKKMIYKLLADPAKDFPHTFFSKKGIDTYHPSWYILDGREQGKYKKGETFDKKFMRDFIDFYKDAVAKHPIWSKFNFVYSPTESYEDIGAFFNEVSKQAYKIRFSYIEESQINEWINNGQLYLFQLYNKDYAEGARGRKNLHTLYWESIFSPENLSNIVLKLNGQAELFYRPQSIKQPVTHKMGSKMLNRRDKSGMPIPEAIYRSLYLYFNSKKTESELTLVEKSYLDQVVVKDVTHEIVKDRRYTKPEFFFHVPITFNVNADGNEYINEQVMEYLKDNPDVNIIGIDRGERHLIYLTLINQRGEILKQKTFNMVGNYNYHAKLEQREQERDQARRSWQSIGRIKELKEGFLSAVIHEITMMMIENNAIVVLEDLNFGFKRGRFKVERQVYQKFEKMLIDKLNYLSFKDRKTDDAGGILRGYQLAQQFTSFQRLGKQSGFLFYIPAAYTSKIDPVTGFVNHFNFNDITNAEKRKAFFMKMERIEMRNGDIEFEFDYRKYKTYQTDYQNIWTVNSSGKRIVMRLDENGRKKMTDYYPTQEIVRAFKEKGMLLNEGADIKALLADIDASPMNASLYGVMFYAFQKTLQMRNSNSTTEEDYILSPVAQNGKQFNTDTEANKGRDTNGNWISKLPVDADANGAYHIALKGLYLLMNPQTKKIENEKWLQFMVQKPYND

SEQ ID NO: 82 - protein, 1243 aa, Anaerovibrio lipolyticus
MVAFVDEFVGQYPVSKTLRFEARPVPETKKWLESDQCSVLFNDQKRNEYYGVLKELLDDYYRAYIEDTLAAFTLDKALLENAYGLYCNRDNNAFSSCCEKLRKDLVKAFANLKDYLLGSDQLKDLVKLKAKVADSAGKSKKKIEVDSRLLAWLKNNAKYSAEDRVKYCEAIEAFEGFVTYLTNYKQARENMFSSEDKSTAIAFRVIDQNMVTYFGNIRIYEKIKAKYPELYSALKGFEKFFYPAGYSEILSQNKIDEYNYKCIGRPVEDADYKGVNSIINEYRQKKGIKSRELPVMSMLYKQILSDRDNDFMSEVITSNEEAIECAKAGYKKSYILFNELLQLFNNSFIEENYEYIYIKTQPLTELSQSLFGDWSVLRNALDNAKYDKEIINLAELVRYFSEYCQILDADDAVKIKNKFILEDYFVQDTLEAALPDLDKITQYKTYLDNMLQVIRKYRLFSMYNGRKKLDVPEKGMDFSNEFNDIYDKLSEFSILYDRIRNFATKRPYSDEKMKLSFNMPTMLAGWDYNNETANGCFLFIKDGKYYLGVADSKSKNIFDLKKNPHLWDKYSFENAFYKIKYKQISGAAKMLPKTFLPSKGKPLSEEKKKKYGHLVTDRIIEIRDNGLYMKSAGDRKAVIEWIDFMKSAIAIHPEWNEYFKFHFKNTEEYASANEFYEDMDKQTYSLEKVKIPAAYVDELVSQHKLYLFQLYTKDFSDKKKKKGTDNLHTMYWNGVFSDENLKAIAEGTKPIIKLNGEAEMFMRNPSIPRKITHERNKPIANKNPLNNKKESLFSYDLIKDKRYTERKFYFHCPITLNFRAAKPTKYNEKINRFVENNPDVCIIGIDRGERHLLYYTVINQTGDILEQGSLNKISSSYTNNKGEKVNKETDYHALLDRKEKGKHAAQQAWETIENIKELKAGYLSQVVYKLTRLMLKYNAVIVLENLNVGFKRGRTKVEKQVYQKFEKAMIDKLNYLVFKERGYEMNGSYAKGLQLTDKFESFEKIDIDKQTGCIYYVIQSYTSHIDPKTGFVNLLNSKLKYESVSKAQETIRKFDRISYNAKADYFEFSFDYGKFGIDMFRNEWVVCTCGDWRWEYSAKDRETKAYCVTDRLKELFKSHGIDYVGGENIVSKIADVADKRFLSTLLFYLRLVFKMRYTVSGTDNENDFILSPVEYAPGKFFDSREAAATEPMNADANGAYHIALKGLMTIRGIENGKLHKFGKGGEKAAWFKFMQNQEYKNNG

SEQ ID NO: 83 - protein, 1251 aa, unidentified; identical to SEQ ID NO: 81
  REGION 1..1251: note = Sequence from GenBank assembly GCA_002373415.1

SEQ ID NO: 84 - protein, 1313 aa, unidentified
  REGION 1..1313: note = Sequence from GenBank assembly GCA_002377945.1
MLDRFTNQYSVTKTLKFELRPMGKTLEHVQKKGFVETDEKLATNYKRIKKTIDVYHKDFISRALSQLSISNLDEFLASYEDNKKNPDDKTKKQLVRIQDNLRKQITSAFTAAEFKTEFSELFKKELLTKNLESFVLEYNKKNDADLFFVDDFKNFATYFIGFHENRKNIYSADAKHTALAFRIIHENLPKFIENMNSLQLIKDDYPALYESLQNQVSTELSSIFSAGFVLDDVLNISFYNELLSQQGIDRFNQLIGGVSTQSGAKKTQGLNELINEYNQQSPRSSGNRKAPKIRPLYKQILSDRGSLSFLPEKFADDRELYDAINDYYLSHLLMVPNDSSEHTLLDSLKHLVASLPSFDLTKIYLKNDKAISSISNRLFGDYSVLPIALGYYYDHHINPDHLDQLAAAKSQKKTSDLYKKKDAFTKGYHSVATIEAAYQAYLASTDSDNGLRKSGIINPVQDYFTRYFVNEPKEDGKAAVDLLRDIDNKYTTIKGVLNSEIEEGTRQLLQKGAEVANIKHFLDAVMNLIHFVKPLGSVIEEDSLLDIDARFYNDFLPLYEELKLFFPLYNKVRNYISQKPYSNEQFKLNFENANLLEGWDVNKEKSRLSVLLQRDGRYYLALMDKSHKKVFEQAPEITPGSENSNSPYQKMRYKLLPGPNKMFPKVFFAKGNIDYFAPSQQLLENYEKGTHKKGDDFNIEHCHQLIDFFKQSVAKHKDWHEFGFKFSDTSTYKDISEFYNEVSKQGYKVTFEDVDADYIDTLVENGQLYLFEIYNKDFSVNSRGKPNLHTIYFKALFDDENLKDAVYKLNGEGELFYRKASIDPENTIKHKKGERVYSKNPLTPDASRVLDYEIVKDKRYTADKFLLHLPVTMNFKADGIGPGQFNNLVKDTIRDDQNKDMHLIGIDRGERHLLYLTVINQDGLIIHQESLNDVVSSNKTVTPYHTLLDTREKERDDARKNWGVIENIKDLKKGYLSQVVHKLAKLIYEYNAVVVLEDLNFGFKRGRFKVEKQVYQAFEKALIDKLNYLVFKEFESDALGGARKALQLTSAFTAFKDLGKQTGFLFYVPAWNTSKIDPVTGFVDLLKPKYENVEQAKDFIDRFDSIRYNKEKDFFEFEFDYSNFGTRAQDTRTDWTICSHGTKRYVYDKNANNNKGGQKQIDVNTELKALFSSYDIDYHGELAGRDLRPMIKSKGDKSMYSSIIFLLKTLLAMRYSKTNGSKVEDFILSPVSNDAGVFFDTRDYDGMDADSSSETSTVLPKDADANGAYHIALKGLWVMRQIQSHTGDDYKGLDLKITNKNWLEFVQTKPYQK

SEQ ID NO: 85 - protein, 1262 aa, unidentified
  REGION 1..1262: note = Sequence from GenBank assembly GCA_002382975.1
MAKNTIFSQFTGLYPVSKTLRFELKPMGKTLEKIKETGVIENDKKRHNDYFDAKKIIDKYHKYFIDAALSKFPRIDWSPLKEAIERSLDRSDASKKKLEKTQTEFRKKIAKALTTHDHYKELTASTPKDLFLKVFPDHFGKQPAIDTFDGFSSYFTGFQENRQNIYSDEAISTAIPYRLVHDNFPKFLSNIEVYKTLKDNAPSVLSDAENELRDFLNGKSLANIFELNAYNEVLTQSGIDFFNQVIGGISDEGGEKKTRGINEFSNLYRQQHPEFAQKRLATKMIPLYKQILSDRETKSFILESYSNDSQVQNSVKEFFESQILNWDIAGRRVNVLNELTSLVKRISEFDLGNIYVNQEELSNISLKLFDNWNSINGLLFKHAENRIGSAEKSANKKKIDAWMKNKEFSIATLNLAIAESNSEEISRVKIESYWNNFEAKVQSILCGDNRRNLDEFISATFNENNALREDSKIIEKLKAFLDALIEIMHSIKPLISDAENRDLSFYNELIPLYDQLSLVVPLYNKIRNYATQKLTESEKFKLNFDNPTLADGWDQNKEEANTAILLLKNGLYYLGIMNAKNKPKIKDFKTSESEDCYDKMVYKLLPGPNKMLPKVFFSEKGLATFKPPKDILDGYNAGKHKKGDLFDIGFCHQLIDFFKESIAKHPDWKKFDFNFSDTSSYEDISGFYKEVTDQGYKITFSKIPTSQIDEWVKEGKLFLFQIYNKDFAPGAKGSPNLHTLYWKSVFSPENLKDVVVKLNGEAELFYRPSSVKKPYSHKVGEKLVNRIGKDGLPLPESVFGELFRYFNGKLEGELSDEAKRYLDVAVVKDVKHEIVKDRRYTQDKFEFHVPLTLNFKADSKNEYMNERVRHFLKDNPDVNIIGIDRGERHLLYMTLINQKGEILKQKSFNVVESVNYQAKLVQREKERDAARRSWSSVGKIKDLKEGFLSQVIHEITTTMIENNAIVVLEDLNFGFKRGRFCVERQVYQKFEKMLIDKLNYLVFKNKPEGDVGGVLKGYQLAEKFDSFQKLGKQSGFLFYIPAAYTSKIDPTTGFANLFNMTELTSAEKKKEFLSHFEDITYDGKNDRFLFSFDYKNFKCFQTDYIKKWTVYSQGKRIVYDKESKSAKEISPVEIIKAALAKQNIALTDQLDVLSAINSVEASPKSASFFGDICYAFEKTLQMRNSIPNTDEDYLASPVMNKRGEFYDSRSCDDALPQNADANGAYHIALKGLYLIKNVFDAGGKELKISHEDWFKFAQSRNC

SEQ ID NO: 86 - protein, 1320 aa, unidentified
  REGION 1..1320: note = Sequence from GenBank assembly GCA_002392725.1
MKNLKQFTEIYPVDRTLRFELKPELLEGQTIDDFWSDYLDENKKDSFYNKDKKRNDDYPVVKLILDQFHKNFISLALKGFLPDSAPKCPTWDDLFDAYCKDRKSKDFANLQDKMRESISNHFKDHEWWQYISSYSKLIGSKLKQLVENDDDFVESIQERDTSLTREKMLEALETFNRFSVYFGNYADNRSNMYKKEAQGTSIANRIVNENLPKFFDNISVYRKLKATCSIELESIQDNLKDTLKGMSLDEIFTPCYFNECLTQDGIEKYNWILGGNPNEDVLGINSVGNEYLQHHPESKLKLKDLVMTQLYKQILSDRVQPSFLPQQYKSEEDLMDSVFSFLSAVEKQGLLESVKRIMETLYDNDTDLSKVYVLGSNLTKLSHLIYGDWNLLGEKLREKLVTSNTKKAQQERDKEIEKWLDNKCFSLLQIKEIEDELLEQTQHPLSTKELFTTLNIWKKENETSLWQKVSLIEQCKTAYIVQFATLRKSFKDGKSISTDESKQILKEVLDKYMELYHIVELLRLGNKSAYLEKDSFYVDYERLFESSDEDTLSLSYIIPLYNKVRSFLTRKLSNEGKMLLKFDSPTLADGWDANKEDANNATILKHSDKYYLMIINPLNKPQLEDGICENGSYRKIVYHQIADASKDLPNLMMIDGKTVRKTGRKSQDGFNHILEDLKNKYLPDEINRIRKCGSYLKTSDSFNKEDSQAYLKYYMQRLLDYKKDEMVFHFKEPNEYESYADFLNDVAMQKYSISFVSFSKDKIDEWRKENKVMLFQVSNKDFKEGACGTENIHTLYWKELFSSRNMDNTIFKLNGGAELFYRSKLSSKPFMHKKGSILVNKTLSDGTPISDEMYKHFVAHFNGKGIDLTDEEVRLLPQVRTNRAKLDIIKDKRYYEHKFYMHVPITINFKAPKITQQQFNERTLELLRQNKKQLNIIGIDRGERNLIYVSIINQRGENIIPPKHFNLIETKTYEEVTRKYNYLEKLKQTEQNRDDARKNWTTIEKIKDLKSGYLSQVVHEIAKMVVKYNAIVVLEDLNFGFKRGRFNVERQVYQNFEKMLIQKLNYLAFKKDAPSSDFGNVWNGLQLTAPFTSFKDLGKQSGWLFYVPAGYTSKIDPATGFVNLFNMNKPAIDYKTFFGSFTQICYKDEMFYFTFDYSNEKFNTVRTDYTNVWTLSTHGERIIREKDELREIQLTRKFKDFFSGDGVNIPLSEVSVDRIKQLEEVKQKELFGLFKLLLKMRNTNGQEDFIISPVAGENPFKTGQNNNMGLTDADANGAYNIALKGLYWVHNGFPIEDKYLKYIKDTDWFEFIQTKPYLND

SEQ ID NO: 87 - protein, 1344 aa, unidentified
  REGION 1..1344: note = Sequence from GenBank assembly GCA_002394685.1
MKTIEQFCGQKNGYSRSITLRNRLIPIGKTEENIEKLKLLEKDKERSKAYVEVKQMIDDFHRSFIEDVLSKTKLEWRELYDKFELFQNEKDKQKKNKIKKELETLQGVMRKQIVKKFKDDDRFDKLFKKELLTEFVPTVIKSDESGAISDKQAALNVFKGFATYFTGFHQNRQNMYSEEAQSTAISNRIVNENFPKFYANVKLFEYLHKNFPEIISQTEQSLSEILKGKKLADIFSADGFNAVLSQSGIDFYNTIIGGVAGEAGTQKLQGLNEKINLARQQLPAEEKNKLKRKMTVLYKQILSDRSTASFIPVGFESSEEIYKSVKQFKEQSLNKILSEVKTLFEKSDYDLNQIYVPAKEVTEFSLKLFGNWSILHEGLFLIEKDGAKKELSEKQVEAIRKEIAKRDCSLGDLQNAYERWAKENDVVVKKTVKNYFKIAELRTVEESKEKTSVEILKNIESAFEKIDFEKQENLIKEKESATQIKDFLDEAQNLYHYLKLLDYRGEEQKDTDFYSKFDEIMQILSEIVPLYNKVRNFVTKKPNEVKKVKLNFDNVSLAKGWDVNKESDYTCILLRRSGLYYLGVLNPKDKPKFDVENNTETCTKKNDCYEKLVYKYFKDVTTMIPKCSTQLNDVKQHFKNSNEDYILENDNFIKPLVISKRVFDLNNKTFNEKKMFQIDYYRNTGDLKGYTEAVKDWISFCMTFVHSYKSTCIYDFSSLGDCSQFKQVDQFYKEINLLLYKIWFVNVTAEKINSLIDSGKLFLFQIYNKDYSTGRDGGNGSTGKKNLHTLYWENLFSEENLCDVCLKLNGEAELFWRDANPDVKNVCHKKGSVLVNRTTSDGETIPEEIYQEIYKFKNPDKQEKNFKLSDVAKELLDSGKVVCKEAKFDITKDRHFTQKTYLFHCPITMNFKAPEITVKTFNEKVQQVLKNNPDIKIIGLDRGERHLIYLSLINQKGEIELQKTLNLVEQDRNDKTVSVNYQEKLVQKEGERDKARKNWQTISNIKELKEGYLSNIVHEIAKLIVENNAIVVMEDLNFGFKRGRFAVERQVYQKFENMLIEKLNYLVFKDKKDTEPGGVLNAYQLTNKVANVSDVGKQCGWIFYIPAAYTSKIDPKTGFANLFYTAGLTNIEKKKDFFDKFDSIRYDRKTDSFVFDFDYSEFGDSADFKKKWELYSRGERLVFSKAEKSVVHVNPTENLKALFDAQGINWNSEDNFIDQIHEVQAERENFSFYDGLYRAFTAILQMRNSVPNSSKQEDDYLISPIMADDGTFYDSRLEYAKGKSDDGKWISKLPVDADANGAYHIALKGLYLLKNDFNLNEKGLIENISNSDWFRFVQGKEYAE

SEQ ID NO: 88 - protein, 640 aa, unidentified
  REGION 1..640: note = Sequence from GenBank assembly GCA_002395825.1
MIQFKVCFGLFRSNLIGEEFMRDFIDFYKDAVAKHPIWSKFNFVYSPTESYEDIGAFFNEVSKQAYNIRFSYIEESQINEWINNGQLYLFQLYNKDYAEGAHGRKNLHTLYWESLFSPENLSNIVLKLNGQAELFYRPQSIKQPVSHKMGSKMLNRRDKSGMPIPEAIFRNLYQYFNGRKAESELSSVEKSYIDQVVVKDVTHEIVKDRRYTKPGFFFHVPITFNVNADGNEYINEQVMEYLKDNPDVNIIGIDRGERHLIYLTLINQRGEILKQKTFNIVGNFNYHAKLEQREQERDQARKSWQSIGKIKELKEGFLSAVIHEIAMMMIENNAIVVLEDLNFGFKRGRFKVERQVYQKFEKMLIDKLNYLSFKDRKPDEAGGILRGYQLAQQFTSFQRLGKQSGFLFYIPAAYTSKIDPVTGFVNHFNFNDITNAEKRKAFFMKMERIEMRNGDIEFEFDYRKYKTYQTDYQNIWTVNSSGKRIVMRLVENGRKQMTDYYPTQEIVRAFKEMGIQLNEGTNIKSLLVDIDASPKNASLYGALFYAFQKTLQMRNSNSTTEEDYILSPVAQNGIQFNTNDEANKGRNANGDWVSRLPVDADANGAYHIALKGLYLLMNPQTKKIENEKWLQFMVQKPYKN

SEQ ID NO: 89 - protein, 537 aa, unidentified
  REGION 1..537: note = Sequence from GenBank assembly GCA_002395965.1
MNDYSKPFLFFKISNKDLSYSESSAKGHRKSRGIDNLHTLYFKSLMSGNQSVIDIGTAEVFFRRSSIKSKGVTHPANVDIPNKNKIGNKSVSKFPYDIIKNKRYTVDKFGFHLSIIYNYKEPKDININGIVREYIKTVEDLHFIGIDRGERHLLYVTVIDSKGRIKEQFSLNEIINEYNGNSYRTNYRQLLEKRDEERQRERQSWNTIEGIKELKQGYLSQVIHKIVTLMVKYKAIVVLEDLNMGFKRGRQKVESSVYQQFEKALIDKLNLLVDKKLDADSTGGLLHAYQLTNKFTSFREMGHQNGFLFYIPAWNTSKIDPVTGFVDLLHPRYESVDKARAFFCKFKTITYNKAKDWFEFDLDYNDFTTKAEGTRTCWTLCTHGARVETFRNPNANSNWDNREVDLTAELKALFDKYGINPEANLKEEIARQTERNFFERLIHLLKLTLQMRNSITGTEVDYLVSPVADENGAFYDSRTCADGLPLNADANGAYNIARKGLWAARQIHEAPIGEKVKLAISNKEWLQFAQSKPYLDD

SEQ ID NO: 90 - protein, 1234 aa, unidentified
  REGION 1..1234: note = Sequence from GenBank assembly GCA_002394285.1
MSEKLINEKFVGLYPVSKTLRFELKPIGRTKEYIEMDGIIDTDTTLSENYTLVKGIIDRYHKSFIEESLRDVKLKGLQEFYELYNKSNRDTADQKRFERIQDDLRKQISQTFKKSGSYATLFKKELIKNELPLFVKGNAEEERLIASFSDFTTYFTGFNQNRANMYSNEAKSTAIAYRLIHQNLPKFMDNMKVFKMLMETEIKKQISGLSNKLSQRYQAMPAINTYFELDGFNNVLTQQGIDVYNTIIGGFTTKEGLKTQGLNEYINLYMQKSKVKMPKFKPLFKQILSDRNSLSFIPENFANDEEVLASIETAFEGIRTDVLETEEVSIGALFDNLVSYDLDRIFVDNDASLTTISQKMYGDWSVFRTAINERYDNTYTGKKKKPEKYEEEKNKILKNIKSYSINDLDSLASDMKMTPGVANYFSEGVKNHIENIYAGNEEFQKIKQKGFVDGNYLKKSDKDIARIKKFLDSIKELQWFIKPLTGSRNINDKDEVFYVELLRLYDALDVITPLYNKVRNYVTSKPYSTEKIKLNFGKSTLLGGWDKNKERDNLGVIFLKDNDYFLGIMNRNNTKILEHAPVATSNMVYKKMNYKFIPGPNKMLPKVFFSKSREVEFAPSEEVLRIRKQETFKKGDNFNIEDCHTLIDFFKDSIKKHEEWSQFGFMFTETEKYKDISGFYREVENQGYKITFNNIDESYINRLVDEGALYLFQIYNKDFSPYSKGTPNLHTLYWRALFSPDNLKDVIYKLNGEAEIFYRKASIRQNDLIIHPANEPINNKDPQNNKKTSLFKYDIVKDRRYACDKFQFHVPITMNFKAPGENQMNTKVNMAIRDSDEMHIIGIDRGERNLLYLSVIDLDGKIVEQFTLNELLTFDKNNHEHIRDYHELLDKREKENIAARQNWTTINTIKELKEGYLSQVIHVICRLIIKYNAIVVLEDLNFGFKRGRQKFEKAVYQKFEKMLIDKLNYLVDKNLQLEENGSLLKAYQLTGKFESFQKMGKQTGILYYVPAWNTSKIDPTTGFVNLFYTKYESIEKTRLFITKFENIWYDQETSSYAFKFNYSDFTYKADGTRTKWILYSHGKRVDHFRNKEKNNEWDVKYVDLTEEFTDLFERYNVNVNSAEFQNNLIAVDNSDFYKRFMKLFALMVQMRNSDEVKGLDQTISPVKNRKRTFYISGTSEELPLDADANGAYNIAKKGLLLVRKIKKSDKEDIKKIKLAISNKEWLSFAQENLL

SEQ ID NO: 91 - protein, 74 aa, unidentified
  REGION 1..74: note = Sequence from GenBank assembly GCA_002412935.1
QAEIFRREASLKEKEVNRAKENKEKSHNIIENARYTKDKLFFHCPIKLNFAKHNEKINQEILKYISDNKEINII

SEQ ID NO: 92 - protein, 602 aa, unidentified
  REGION 1..602: note = Sequence from GenBank assembly GCA_002418835.1
MNNLTEFINLYSLQKTLRFELKPVGKTLEHINNNELLQRDEQRAESYIKAKEIIDEYHKDFIENSLVDFRFQLEDKGNKDSLTEYYSYYSIKQKNEADKKIFSDIQANLREQIASKFSGKSGKKIIDDDAAKRFQRLFAKELIKEDLIEFIKSESYIEILKKKNKELNAPHIEEKIEKDLETISEFNEFTTYFSGFHDNRKNMYTTEDKSTAIAFRLIHQNLSKFIDNIFIYEKIKETSVSQDIKKLYQEMKEHLNVNSIDSIFAILFYNNVLTQKQIDIYNTVIGGKSVENDVKIKGLNEYINLYNQQQSEKSKRLPKLKPLYKQILSDRNTVSFLSEQFNSDNEMLQTIESLYREIDSLVINKSRDGESSLKQLLINLNDYDLHHIYLRNDQSLTDISQKFLGNWDVIQRAVELDYEKEHPKKDKESAEKYDESKKKYFKSFDSLSIGYINECLQLIGEPYNKKIQDYFIHFGSEQELKDAEDIFKQIENAYNELEELMTNQYPENKDLSQDQNNVDKIKHLLDSLKSLQRFVKPLLGKGEESDKDERFYGELTELWNEFDKVTPLYNKVRNRMTRKPYSEEKIQLFFENKKSIPGRLGG

SEQ ID NO: 93 - protein, 671 aa, unidentified
  REGION 1..671: note = Sequence from GenBank assembly GCA_002424135.1
MSIYGNSYIGGNYNEDKLILIDCIKKYIEQISDSTIKQKINNEFLKIKEETPSLLLNTLKTISYNNYKELFEYEPFKDENKRVTKNLKDTILTLNRIPKSKQYYNIEFNSFVEAQKAIEELCKEKVFNYFLVSDNEMETLQNRLDNPLLLFKITNKDLSFAETYIEGKRKSRGIDNLHTMFFKLLMSGSQNTLDIGTGKVFYRKKSLNYSEEIYQKGHHYNTLKDKFHYPIISNKRYCYDKFQFHLSIFQNYQQPKSIITKDFNQNVNQYIKENKVKHIIGIDRGERHLLYLSLIDLKGNIIKQFSLNEIINEYKGGKYKTNYRDLLNKKEVDRDEARKNWQTIENIKELKEGYLSQVIHKISELMIEYNAIVVLEDLNSAFMRGRQKVEKQVYQKFEKMLIDKLNYLVDKKKDPNEKGGLLNAYQLTSKFESFQKLGKQSGFLFYVPAWNTSKIDPTTGFVNLFDTRYENREKTITFFDKFKRIEFNKAKDYFEFEFDYSKFTTKAEGTKTNWTICTNSTRIETFRNKDKNSQWDNKEIVLSQAFKDLFDKYMIEYKSNLKANILSQDRKEFFEELLHLLKLTLQMRNSKTGTDIDYLISPVANQKGVFYDSRVVNDTLPKNADANGAYNIARKGLWVINQIKETNDLKTLKLAISNKQWLSFVQNLIEK

SEQ ID NO: 94 - protein, 1307 aa, unidentified; identical to SEQ ID NO: 65
  REGION 1..1307: note = Sequence from GenBank assembly GCA_002449305.1

SEQ ID NO: 95 - protein, 1307 aa, unidentified; identical to SEQ ID NO: 65
  REGION 1..1307: note = Sequence from GenBank assembly GCA_002449425.1

SEQ ID NO: 96 - protein, 1278 aa, unidentified
  REGION 1..1278: note = Sequence from GenBank assembly GCA_002455375.1
NSMQQFINKYTLSKTLRFELKPIGKTLENIQTKGLLQQDAIRAKSYQEVKKLIDRYHQYFIELALDGLKLNNLQDFQEQYLASPEEKKKEDFKKKFEKNQDDLRKEIVAAFKTGDANEIFKVLDKKELITELMVAWLTKQEDKDRIEEFKTFTTYFIGFHENRKNMYTDKAQSTAIAYRLVHENLPKFLDNIKVFEKLKAVPELHEKCSVLYKEIEEYLNIRSIDEAFELDYYNSVLTQKQIEVYNLIIGGRVAKENEKKIQGLNEYINLYNQPKDKKNKIPKLKPLYKMILSDRESVSFLAEKFENSQEVLKAIQEYYHANIKSYQSSEKDGAENVLERLQELLANLSSNNLSQIYIRNGKTITDISQALFGDFSLIKDALKYSFTNTLEIGRNGLSKKQEEVIEKYLKQDYFSITEIEVALWNYRTENDLLKDLEEEQHLIANYFNSYFKTTVNDKEYDLVANVTAKYSCIKGLLEQDYPEDKKLNQETKEIDDIKAFLDALMLVLHFVKPLMLPHDSTLEKDQSFYNTIAPYYEELQYLISLYNKVRNFASQKAYSVEKYKLNFENSTLLAGWDVNKEPDNTSVLFRKENDYFLGVMDKKHNGIFKKTPKSKTQDTYSKVNYKLLPGASKMLPKVFFSRSNIAFYNPSEEIITIRNHSTHTKGGTPQTGFEKKDFNLSDCRKMIDFFKDSIAKHPDWKQFGFNFSDTDSYDSIDGFYREKEAQGYTISYTEIDETYIHQLVDEGKLYLFQIYNKDFSEFSKGKPNMHTLYWKALFDSENLRDVVYKLNGQAEIFYRKSSIKKDKIIVHKANEKVANKNPLNTKKESLFTYDLVKDKRFTVDKFQFHVPITLNFKASGNDYINQEVLSFLRQNPDVNIIGLDRGERHLIYLSLINQKGEILQQFSLNDIINEYKGITHKTAYKTLLEKKEKERADARENWGTIESIKELKEGYISQVVHKIAKMMVEYNAIVVMEDLNMGFKRGRFAVEKQVYQKLEKMLIDKLNYLVFKDKAPNEAGGLYNALQLANKFESFQKMGKQSGFLFYVPAWNTSKIDPTTGFVNLFYTKYESIEKAQKFFEKFDSIHFNTKEQYFEFAFDYDNFTERATGTQTQWTVCTQGERILTFRNPSANNQWDNKEIKLTEQFEDLLGKHNISYGSGTCIKAQVATQSGKDFLKGMMDLFKLTLQMRNSITNSEVDYLISPVRNAQGSFYDSRNADATLPKDADANGAYHIAKKGLMWLHQIHEFEGNDWRKLDLDKTNKGWLNFVQPKNKTNE

SEQ ID NO: 97 - protein, 1311 aa, unidentified; identical to SEQ ID NO: 74
  REGION 1..1311: note = Sequence from GenBank assembly GCA_002481865.1

SEQ ID NO: 98 - protein, 1313 aa, unidentified
  REGION 1..1313: note = Sequence from GenBank assembly GCA_002633275.1
MKAETNLTELVNLYSLQKTLRFELIPQGETLQNIEKMGILTQDNQRTDDYEKVKTIIDEYHKRFIEICFKDFVLEDLDKYQELYITKNRSEQENTEFQKLKTNLRKQVVNRFKENDKLKRLFSKEFIKEDLVEYLDGRDEDKTRVERFKDFTTYFTGFFENRKNMYSDGEQSTAIAYRLIHENLPKFIDNLSIFNKIVERNEIKTKFSTIVNDLNCHLHSPINSIEEVFTIDYFNKTLSQKQIEDYNTIIGGVSKNNEKVQGLNEYINLYNQQQKDKSNRLPLLKKLFKQILSDREPISWLPEELSSDKDMANSVLNLYKEVYEIIYSNDNSLYNLITYIDNYDLSKIYISNDQSLTTLSQRIYNRYDIYTFAIKQTLKELNRQKRKENIEKYEARIDNLFENCESFSIEELNNIVKNTYKENEEIDTSKTIEQYFKDFGAINKEHIQKENLILQLENAFTVAKPILEAIDDNNKGISQDKDAVDKIKNLLDVLKDIQHFVKPLLGSNIEADKDENFYGSFSDIYQRLDKITPIYNMVRNYLTKKPYSEEKIKLNFEKGNLLNGWIDSYTEKSDNGTQYSGYLFRKLNSIGEYDYYLGISLDTKLFRNTDNVEENDKSEFERLDYYQLKSQTFFGNSYKGKQTYNKDKEDMITIIDDFIERLPNIHPLKERSKNKPDTFTPNQYLTYFKNYQEEYNCLLKDKKFKNKNEELIKNIIETIKSINRLPKDKIKAIISKNYTVFSEIISDIQDTLLKEKIFNYISVSKKAMEAAAKREQKTLYLFKISNKDLSYADTHSKGDRKSRGTENLHTIYFKTLMSGEQNVLDIGAGAIFYRKKTEWLKSSPTHKANEKIQNKNSHTKSEFEYGLIKDKRYIENKFLFHLSLTLNYQSKGIKNINPIVNNMIRNKEIKHIIGIDRGERNLLYLSLIDLKGNIVKQMSLNEIINEYNGNKYKTDYHDLLAKKEEERKKARLSWGTIENIKELKDGYISQVVHIISQMIVKYNAIVVLEDLNFGFMRGRQKIEKQVYQKFEKKLIDKLNYYVDKQKNSNEIGGLFHALQLTNKFESFKDMEKQNGCLFYIPAWNTSKIDPVTGFVNMFDTSYCSVKESKVFFSKFDTIRYNAKDDLFEFAFDYDNFTTKAQGTKTQWTLCSFGQRIEIFRNKEKNNTWDNKEININDEFKQLFNEFNIDININDNLKQEIQKQTSAEFFKRIMHLMKLLLQIRNSITGSTEKNDDYIISPVADENGVFFDSRKVNEPDNLPIDADANGAYNIARKGLWVVRQIQNTKDEDKINLAISNKGWLNFVQQKLYLND

SEQ ID NO: 99 - protein, 528 aa, unidentified
  source 1..528: note = Candidatus Moranbacteria
EGNLYLFEIYNQDFAIGKTGKKNLHTMYWEGLFSVENTNGFPLKLNGEAEIFYRPKSIEAEREKRCKSKRDIIKNKRYTEDKIFFHCPITLNRGKGEAKYFNQEINDVLANNENINIIGVDRGEKHLAYYSVINQKQEILESGSLNSVGGKSLNGEIVSVDYAEKLERKANEREQARRDWQSVEGIKDLKKGYVSQVVRKLADLAIQYNAIIVLEDLNMRFKQIRGGIEKSIYQKLEKALIDKLSFLVEKGEIDPKKAGHLLNAYQLTAPFESFQKMGKQTGILFYTQASYTSKIDPLSGWRPNLYLKHSNAKKDQAIISQFSSILYNTEKNRFEFTYDVKKFQTLKEWPKNTVWTICSSVERFRWNRTLNQHKGGYDHYTDMTEQFDILFKSYKIDIRSDIRVQIMNLEAKGNEKFFADFIFFFNLVCQIRNTDPLKEKDDPLGDFILSPVAPFFDSRKAEDFGKNLPKNGDDNGAYNIARKGIIILDKISAFKEKEGSCKDLKWGDLYVSQSEWDTFAQMRRETKK

SEQ ID NO: 100 - protein, 1322 aa, unidentified
  source 1..1322: note = Candidatus Gottesmanbacteria
MTGIFKDFTHLYELQKTLRFELIPVGRTKELLEKNHVFEKDEKIAENYKDVKKYFDRLHKEFIKDAFSHTNLPENLLEGYEQKYFSHKLNPSRASRIDLEKIAKRLRTILLKSFNTEADQWKNRYLKNIEQTLKNKNEKQQKKELEKKLKKIKEGTKGIELFFKVEVFDFLKYKYPEAQINGKSIFDPFNKFGCYFKKFHETRINFYKDDGTSTAIPTRIINDNLSIFLENKKIFESKYSKKHKSVFAKNELRIFVLFYFNNCFSQKQIDGYNNTIALINSNVNQLRQNNPEVSKKDLPFFKRLFKQILSQPSKQEIEQDSFIEIFQDEDVFPTMQKFINENKICIPKAKSIFKKFISSQKVKSDEYNISQIYVAKRFINTISNKWFSNWNTIRNLLIPKDKKNIPDFISVTSLKAALQKTQNIVEVNDLFRKEYRDILEEGSDFYQIFLKIWEKEFEKATDIYLNETKEIEKMITEDKKYLPNKKGRLKSGKKGSIQKEKFLDYTQSVFDIYLMMKYFSLEKGKERVWNPEALDEDAIGGFYEKFKEYYENINTWKYFNVFRNYLTKKPYNSEKIKLNFECSSLLSGWSKNYDSYGALIFEKNEKYYLGIINGTKFTKDEIEQLYLDIRNNNISLRLVYNYQKPDFKNFPKLFIRSSGSNFAPAVKKYNLPIDSVLNIYDKGLFKTSNKSSQNYHESLKKIIDYFKLGISQHESYKGFSFKWQETSEYDNISDFYKDATRSCYKVTWENINFSKLYELIESGRLYLFQIYNKDFELDENIAPKGYNFKDKNGRRNLHSIYWKALFSNTNFKKTILKLNGGAELFYRKLTKNLTKDPIITVKNQIKIIKKNNNIFHKKRFTQNKIYFHCPVSINFTENDWKINTKICNTIRNNSKVKIIGIDRGEKNLAYYSVIDHQGNILETDSFNEVQEREDREPTDYQKKLDQIQKERDWQRKSWQEISSIKEMKKGYISQVVHQICKLIRKYEAIVVFEDLNIGFKRGRFAIEKQIYQNLELALAKKLNYMVFKDAKEEETGHFLQAYQLTPPVINFQDIGKQCGIIFYVPASYTSAICPACGFRKNISTFVEKIEKNIDLINKFNIVYDPDKDRFCFRYKRSDFIKSEKEKEDDSKVKLYSNTKLPDDFTFYSNVERFKYIRDQNNRGGKVELKYPNDSLKKLFHENGINFQNFSNISQLIKTRNFENENFYKPFIYIISLILQLRNTTIEINQNENNEKYRDFISCPHCYFHSENNLITLTKRYKGKKPFEFNGDANGAYNIARKGILILQKINKAKRLEEIEYGGLTVTQQEYDKYLALVSSKKA

SEQ ID NO: 101 - protein, 841 aa, unidentified
  source 1..841: note = Candidatus Roizmanbacteria
MDHALAVNQILKYFLVKENKTKGNPLDSEISNALKNILFEGKIIFDGKEIDVDWFRWYDALRNYLTKKPQDDAKENKLKLNFKNSTLAGGWDINKEPDNHCVILQDQNDKQYLGVIAKKEKQRGYNKIFEKTPENPLYKIDSGEVWQKMEYKQIAAPTGIGGFVRKCFKTAQQYGWKCPDNCLNSEGKIIIKNDEAKENLEAIIDCYKDFFIKYEKDGFSYKKFSFNFKKSSEYEELNNFFSDVERQGYKLDFTTINKAIIDQWVEDGTIYLFEIKNQDANDGKKEGHKNNLHTIYWKALFENNEDKPKLNGGAELFYRKALPKSKQEKIKDNHGKEIIKNFRFSKEKFLFHCPIKMNYKAKSYSDPKYALPEINNQINEALTTFGDIHFLGIDRGEKHLAYYSLVDKNGEMIDKGTLNLPFIDQEGKPRSIKKPKYFYNKKKDKWESEEINCWDYNDLLDAMASNRDMARKNWQTIGTIKELKEGYISQVVRKIADIVVEHGAFIVLEDLNTGFKRGRQKIEKSVYQKFELALAKKLNFLVDKSAKSGEIGSVTRALQLTPPVNNYGDIEKRKQVGIMLYTRANYTSQTDPETGWRKIIYLKKGNEEAIKEQILQNFTDIWFDGLDYYFEYPNKNKSDKPWKLYSGKGGKSLDRFRRSRGKDKNEWTIEPVNVVNILKQVFVNFDEKRSLRSQIIEGKALARTKEKTDFTAWEALRFAIDLIQQIRNTGNNEKDADFLHSPVRDTNGNHFDSRSVSHDRPTSGDANGAYNIARKGLMMNEHIRTWAKKGKPKYDKNTNDLNLFISEEEWDLYLADKKAWQEKLLMFSSRKAMDEEKKKHI

SEQ ID NO: 102 - protein, 841 aa, unidentified
  source 1..841: note = Candidatus Roizmanbacteria
MDHALAVNQILKYFLVKENKTKGNPLDSEISNALKNILFEGKIIFDGKEIDVDWFRWYDALRNYLTKKPQDDAKENKLKLNFRNSTLAGGWDINKEPDNHCVILQDQNDKQYLGVIAKKEKQRGYNKIFEKTPENPLYKIDSGEVWQKMEYKQIAAPTGIGGFVRKCFKTAQQYGWKCPDNCLNSEGKIIIKNDEAKENLEAIIDCYKDFFIKYEKDGFSYKKFSFNFKKSSEYEELNNFFSDVERQGYKLDFTTINKAIIDQWVEDGTIYLFEIKNQDANDGKKEGHKNNLHTIYWKALFENNEDKPKLNGGAELFYRKALPKSKQEKIKDNHGKEIIKNFRFSKEKFLFHCPIKMNYKAKSYSDPKYALPEINNQINEALTTFGDIHFLGIDRGEKHLAYYSLVDKNGEMIDQGTLNLPFIDQEGKPRSIKKPKYFYNKKKDKWESEEINCWDYNDLLDAMASNRDMARKNWQTIGTIKELKEGYISQVVRKIADIVVEHGAFIVLEDLNTGFKRGRQKIEKSVYQKFELALAKKLNFLVDKSAKSGEIGSVTRALQLTPPVNNYGDIEKRKQVGIMLYTRANYTSQTDPETGWRKIIYLKKGNEEAIKEQILQNFTDIWFDGLDYYFEYPNKNKSDKPWKLYSGKGGKSLDRFRRSRGKDKNEWTIEPVNVVNILKQVFVNFDEKRSLRSQIIEGKALARTKEKTDFTAWEALRFAIDLIQQIRNTGNNEKDADFLHSPVRDTNGNHFDSRSVSHDRPTSGDANGAYNIARKGLMMNEHIRTWAKKGKPKYDKNTNDLNLFISEEEWDLYLADKKAWQEKLLMFSSRKAMDEEKKKHI

SEQ ID NO: 103 - protein, 1322 aa, unidentified; identical to SEQ ID NO: 100
  source 1..1322: note = Candidatus Gottesmanbacteria

SEQ ID NO: 104 - protein, 1168 aa, unidentified
  source 1..1168: note = Candidatus Roizmanbacteria
MNSIWAETNKKNLKTEDFQNKDIEDGISIFTPEFYVHCLLQTDINTYNAKIVELNKFFNENKKPNSDIKYLKTLQKQLLLTDKPDGEEDYFVYEILDDDELIKGLEEFSTLSREKIKGIKTFLQGKIEYNLEDIQLNENQLHYFCNKYFGSWSYIRDLYYQQNNIVDEDQAKKDSEFKDKEGISKVAISLLEIKELLNKETVENFIETIKNGWFCRDYKYPSKTNIDLLKNAGVYKEESGNFENFLSFLKFELDSLLNGRAFLTKREQEDKEKIKATKQSLKNSQKERERVDELLLNKFSEENFTQDIADSFEKKQEKFESAFTDLKKAIENKQKLQRAKDFECKKAINEYCTRISDINRYFALFSVPEGVTSGFLNTVVTEFKEDNQIVPLFNAIRNYITKRPEETEKVKLNFDYNNLLDGWVYKNSDHPASSDYHCRLFRKNDSIFLGIVGDAENNLIDSSYELMDYYQIKGQTIFGSTYAGLFNENKYTQDRQEKSNKELLNNIDKIIDEKLIAAFPKAETYIKKIKKDRTSGLFDFEITREQIDRLFTGKTGTTYDEYRKADKKKVVLEILRKNFRNIFNFNEEADYLVNKIGELFGKTPKRKDFKGVDKMVYELTKLEPFFYKISFNAVKQNSNDTKIKALFQIYSKDFSPDKNPNSKKNLHTLYFEELFSKENEENPIFKLSGGAEVFFREKIDDYKVDQWEKKRLKNPKTDKLPNKKRRFTGNQILFHLPIVLNNINDGGSVNRKVHEYIQENEDVKIIGIDRGEKELAYYCLLDQFGTIIDEPKTLNTMGSNVIDGVRQPINYRNKLDIRERERMIARRSWTKIEGIKDLKQGYISNVVNEIAKLMVDNDAFICLEELNHGFKKDRSIRIEKGVYQRLENALVDKLNYLVLEKTPEGVRNARQLTEKNRAIKSWGNQMGALFYTDAKFTSKTCPNCGFRKRGVSDFNNRENLREKIKNGDLKVFFEKKKDRFRIEYNWNYEYRMNNKTELYSNRDLYDQENNMEYIYSDVIRSDWYRKYDPTIKLKEIFKAFYQTSKENIAIKENHFSYSVFIEVFNIILNIRNRTNEEDIISCPKCHFSTLPPKVQKINNGDANGAYNIARKGLMIFEKIRSEKLRKKIYTKKGIESKDLKITLQEWDELTYSQWNKKDWNESNNERGL

SEQ ID NO: 105 - protein, 840 aa, unidentified
  source 1..840: note = Candidatus Falkowbacteria
MLAVWQSEIKRKFEQIFDGYKLEKDDVFGRKKGEWVEPFIENFQKVSQEKFDRGVKDENGRSIHTEVVKNLIEEGYLRLFQLTKYHNLDKKGERDPRPFDGNFYATLDEFWKDNIVVVYHKALQSTLTKKPYSEDKIKLNFENGSLLGGFSDGQERSKAGVVLKNKNKFYLGILIDRGFFRTDKANPVYDNAQNNEWERLILTNLKFQTLAGKGFLGKHGVSYGEMGKDNPMMAVEYLQKFIKLKYLDKYPALNEVAHKKYTIKKEFDADVKNALKDCFTMNFKPVDFGMIRQGLTESLFYLFEIVNKDISSQAKNGKNVHTLYWEALFGDQNLKKPILALNGGAEIFYRESQREKLEKKLDKSGKEVLDHKRYGQDKYFLHASITINYGQPKNIKFKEVINEKISQNADRVNIIGIDRGEKHLLYYSVVSPEGVLLEQGSFNQIETKNKVDIKAVKAEYGERGELKKVELVPTGKKVKYVDYQILLDYYEKKRNLARRDWQTIGKIKDLKDGYLSQTVHRIYQLILKYNAVVAMEDLNVEFKAKRAAKVEKSVYKNFEMALAKKLNHLILKDRRADEIGGALRAYQLTPAIPANDVGKFDKAKQWGIMFYVRANYTSTTDPLTGWRKHKYISNSEKIDNIQKFFSPGDGIQIDYDTEKQCFKFSYDHELEGGAKKHWELFACDGLERFYWDNRERQIKKYNLYEEFEKLLGGLRKEENINIQIDGVSEFRWKDLVFFWNLLNQIRNTDRSAQGDENDFLQSPVWSEKYNCFYDSRKAPNNMPNNGDANGAFNIARKGQLILERIKKCSDIPKFGNDNNGKNPENNYFISDADWDKFAQK

SEQ ID NO: 106 - protein, 1275 aa, unidentified; identical to SEQ ID NO: 75
  source 1..1275: note = Candidatus Yonathbacteria

SEQ ID NO: 107 - protein, 553 aa, unidentified
  source 1..553: note = Candidatus Roizmanbacteria
MVYELTKLEPFFYKTSFNAVKQNSNDTKIKALFQIYSKDFSPDKNPNSKKNLHTLYFEELFSKENEENPIFKLSGGAEVFFRKKIDDYKIDQWEKKSLKNPKTDKLPNKKRRFTENQILFHLPIALNNINDGGSVNRKVHEYIQENEEVKIIGIDRGEKELAYYCLLDQSRAIVDGPKTLNIVGSNILKNKEGVEKKQSVNYRDKLDIKEKERMMARRSWTKIEGMKDLKAGYISNVVNEIARMMVDNNAFVCFEELNHGFKKDRSIRIEKGVYQRLENALVDKLSYLVLKKTLEGVRNALQLTPKNKAIKYWGNQMGAIFYTDAKFTSKTCPHCGFRRRGVEPMKKAKEIKEKFAKDQLKIFFEKSKDRFRIEYFWKVEAFDFSCENLYGKGKMEVIYSDVERNSSNNGSLKDIFKDYLQEDIELFSLVQNDAKFRYVDFGKVFNSLVWLRHTVERDSEMFDCISCPKCHFSTMSLKARKIKDGDANGAYNIARRGLMIYEKIRSEQLKKKMNTKDGIASKDLKINLKEWDEETYKQWDKMDWEVSGNIRGL

SEQ ID NO: 108 - protein, 537 aa, unidentified
  source 1..537: note = Candidatus Yonathbacteria
LYLFKIHNKDFGEKSKGTQNTHTLYFLNLFSQHNLTHIKLRLAGNAEVFYRKSSTQRKEEQRKFIRPIVKNKRFTEDKYFFHIPIKIGASVNSISETKFNRTLNEKLRQSACLIIGIDRGEKHLAYYSVINQKGEIVDQASLNKINDVDYCEKLRTREKERLEQRKSWKAISQIKDLKRGYISQVIHKLSELVIKHNAIIVFEDLNMRFKEVRGGIERSAYQQLEKALIEKFGYLVFKDKDPLEAGGVLNGYQLSAPFESFEKMGKQNGVIFYTNPEYTSTTDPVTGWRQHIYIKSDATDNEALKVFTEKIGIGWSDDKQSYTFSYDQKDFWEDSPARKWVLYANAPRLERYRNDAGYWTTRETNSNDLLRELFEVWDFDQPEGDISEQIAMMYEEGKLKGEKIISEKSQRFFKALRYALNLTQQIRNSDSIRYVYERDAQGDIVEDSQGKMVVKEIGENVDFIASPVVPFFTTPNPYTKENLCGLVIENGDANGAYNIARKGIMMLERIKQTQANPDLYISKSDWDEWLMKDIKQK

SEQ ID NO: 109 - protein, 538 aa, unidentified
  source 1..538: note = Candidatus Yonathbacteria
ELYLFKIHNKDFGEKSKGTQNTHTLYFLNLFSQHNLTHIKLRLAGNAEVFYRKSSTQRKEEQRKFIRPIVKNKRFTEDKYFFHIPIKIGASVNSISETKFNRTLNEKLRQSACLIIGIDRGEKHLAYYSVINQKGEIVDQASLNKINDVDYCEKLRTREKERLEQRKSWKAISQIKDLKRGYISQVIHKLSELVIKHNAIIVFEDLNMRFKEVRGGIERSAYQQLEKALIEKFGYLVFKDKDPLEAGGVLNGYQLSAPFESFEKMGKQNGVIFYTNPEYTSTTDPVTGWRQHIYIKSDATDNEALKVFTEKIGIGWSDDKQSYTFSYDQKDFWEDSPARKWVLYANAPRLERYRNDAGYWTTRETNSNDLLRELFEVWDFDQPEGDISEQIAMMYEEGKLKGEKIISEKSQRFFKALRYALNLTQQIRNSDSIRYVYERDAQGDIVEDSQGKMVVKEIGENVDFIASPVVPFFTTPNPYTKENLCGLVIENGDANGAYNIARKGIMMLERIKQTQANPDLYISKSDWDEWLMKDIKQK

SEQ ID NO: 110 - protein, 1209 aa, unidentified
  source 1..1209: note = Candidatus Uhrbacteria
MLEDAKVFEKDETIQKKYEATKPYFDRLHREFALEALQDQKLDFKNYLELYRKYKADKKASGKLLINIEKDLRKEVVKLFDKQGEKWAKQYPGLKNKNIGVLFKEAVFTVILKERYGNEKETQILDESSGQLVSIFDSWKGFIGYFKKFHETRKNFYKDDGTSTALATRIIDQNLKRFCDNILIFESTKEKVDFSEVEISFGKPLSEVFTLEFYNTCFLQNGIDFYTKILGGETLQNGEKVKGLNECINLHKQKTGEKLPFFKSLDKQILSEKDKFFIDEISNETQLLEVLKSFVASAESKTDTIKTLVDDFVKDQDKYDLNYIYFSNDGLNTITRKWTTETQVFEEALYTALKAAKVVSSSAKKNEGGYSFPDFIPFAHLKTALESIKIDGTIWRDNFNAIENFEEKSIWAQFLAIYNFELSNLFETEIKNPEIGNCPTIGYNVYKQDFEELLKSFVYDPNAKVTIKNFADNVLSIYQMAKYFAVEKKRGWNTDYELDVFYTDPQNGYLQYYENAYEEIVQVYNKLRNYLTKKPYSEEKWKLNFDSGTPIKYTTRAIIFNNTTNERYYLGLLKKGVAKPREFEPINNNIISSGEFRRMIIQQLKFQTLAGKGYVRDFGVKYSEDKDGVKHLQQLIKKQYLSKYPCLKKIADGVYNDKKAFDADIKDVLLETYNLDFQPISEEFILNKNRLGEIYLFEIHNKDWNLKDGKNKSGSKNLHTMYFESLFVDKTTFKLNNEGAEVFYRPATNEGKLGTKKDRNGKIIINHKRYATDKILFHCPIGLNKDAGKSYTFNAKINNMLANNPDINIIGVDRGEKHLAYYSVITQKGKILDRGSLNKVEGGDKQEIDYAKKLEETAKNREQARKDWQAVEGIKDLKRGYISQVVRKLADLAIEHNAIIVFEDLNMRFKQIRGGIEKSVYQQLEKALIDKLSFLVMKGEADPEKAGHLLKAYQLVAPFESFQSMGKQTGIIFYTQANYTSKIDPITGWRPNLYLKYTSAEKAKADILKFSKIEFVNNRFELTYDIKNFVLDKKVVLSNKTKWTVCSSVERFRWNRRLESNQGNYEHYENLTENLSSLFKDFGFEIEQNIIRQVEQLATKGNEQFFRSFIFYVNLIFQIRNTDAKAKDQNKEDFILSPVEPFFDSRTPEKFGENLPENGDDNGAFNIARKGIIMLNKISAYKQEVGNVDKIIWKDLFISAAEWDNFTQE

SEQ ID NO: 111 - protein, 743 aa, unidentified
  source 1..743: note = Candidatus Uhrbacteria
IKNFADNVLSIYQMAKYFAVEKKRGWNTDYELDVFYTDPQNGYLQYYENAYEEIVQVYNKLRNYLTKKPYSEEKWKLNFDSGTPIKYTTRAIIFNNTTNERYYLGLLKKGVAKPREFEPINNNIISSGEFRRMIIQQLKFQTLAGKGYVRDFGVKYSEDKDGVKHLQQLIKKQYLSKYPCLKKIADGVYNDKKAFDADIKDVLLETYNLDFQPISEEFILNKNRLGEIYLFEIHNKDWNLKDGKNKSGSKNLHTMYFESLFVDKTTFKLNNEGAEVFYRPATNEGKLGTKKDRNGKIIINHKRYATDKILFHCPIGLNKDAGKSYTFNAKINNMLANNPDINIIGVDRGEKHLAYYSVITQKGKILDRGSLNKVEGGDKQEIDYAKKLEETAKNREQARKDWQAVEGIKDLKRGYISQVVRKLADLAIEHNAIIVFEDLNMRFKQIRGGIEKSVYQQLEKALIDKLSFLVMKGEADPEKAGHLLKAYQLVAPFESFQSMGKQTGIIFYTQANYTSKIDPITGWRPNLYLKYTSAEKAKADILKFSKIEFVNNRFELTYDIKNFVLDKKVVLSNKTKWTVCSSVERFRWNRRLESNQGNYEHYENLTENLSSLFKDFGFEIEQNIIRQVEQLATKGNEQFFRSFIFYVNLIFQIRNTDAKAKDQNKEDFILSPVEPFFDSRTPEKFGENLPENGDDNGAFNIARKGIIMLNKISAYKQEVGNVDKIIWKDLFISAAEWDNFTQE

SEQ ID NO: 112 - protein, 964 aa, unidentified
  source 1..964: note = Candidatus Ryanbacteria
MTDNGRDEFQKVIYEQTKKDKIVKFEKSDNSYRFPDFIALSLIKNALAKSFEEEKLWKDKYLKNEEDSKSKGFLSGEEPKWEQFIKIFESEFNSLFENEYQELIGGEERQVKKGYNVYKKDFEEIINRNESDFSVSSEDKLTIKNFVDSTLWIYQMGKYFALEKKRQWVGDEYDIDTKFYHHPDFGFKKKFYDDAYGKLIKVRMLLQSYLTKKPFSTDKWKLTFENPTLADGWDKNKEPDNSAVILRKDGRYYLAVMQKGHNKVFDDGNIQASGTDSYEKMVYKSISDPVKDIPNLMVIDGRTVRKTGRKDKKTGINHRLEELKDEHLPKEISDIRKSSSYLKTSENFNQEDSQKYLAFYMQRLIEYKKGEFDFEFKKPEEYGSYAEFLDDVGNQGYKIDFVGVSSEYIKNKNTSGELFLFEIHNKDWGSGPKDKNRKRTKNLHSMYFDTLFSKENAESNFPFKLNGEAELFYRPKTDEEKLGYKVKNTKTGKWKNIVVKKSESVPEEAVVDHKRYLKNKTFLHVPITLNRTADDSHYFNQKVNEFLLNNPEINVIGLDRGEKHLIYYAGIDQKCNLLKDKNGNTALGSLNEINGVNYHKLLEERAKGREKARQDWQNIENIKDLKKGYISLVVRKLADLIIEHNAIIVFEDLNMRFKQIRGGIEKSVYQQLEKVLIKKLNFLVNKGEKDPQKAGHLLRAFQLTAPFITFKDMGKQTGVIFYTQASYTSKTCPECGFRPNVKWDQDGLMEKINITFTENNFKIAYKASDFLKQKNSSKRGNRLYADKKGKDEFILSTKNAIRYKWFSRNKKDFELKKGEERMLEQTENGITIKYDITECLKGLLEEQDIDYKNNIVKQISEKVATKKFFTELAYYLYLLSNTRSSVSGTNIDQINCPHCGFHSDKKFNGVDFNGDANGAYNIARKGVMILEKINQYHNVNKTLDKMNWGDLFIDIEEWDKHTQD

SEQ ID NO: 113 - protein, 1209 aa, unidentified; identical to SEQ ID NO: 110
  source 1..1209: note = Candidatus Uhrbacteria

SEQ ID NO: 114 - protein, 1322 aa, unidentified; identical to SEQ ID NO: 100
  source 1..1322: note = Candidatus Gottesmanbacteria

SEQ ID NO: 115 - protein, 1302 aa, unidentified
  REGION 1..1302: note = Sequence from GenBank assembly GCA_002842495.1
NNMKNMESFINLYPVSKTLRFELKPIGKTLETFSRWIEELKEKEAIELKETGNLLAQDEHRAESYKKVKKILDEYHKWFITESLQNTKLNGLDVFYHNYMLPKKEDHEKKAFASCQDNLRKQIVNAFRQETGLFNKLSGKELFKDSKEEVALLKAIVPYFDNKTLENIGVKSNEGALLLIEEFKDFTTYFGGFHENRKNMYSDEAKSTAVAFRLIHENLPRFIDNKKVFEEKIMNSELKDKFPEILKELEQILQVNEIEEMFQLDYFNDTLIQNGIDVYNHLIGGYAEEGKKKIQGLNEHINLYNQIQKEKNKRIPRLKPLYKQILSDRETASFVIEAFENDGELLESLEKSYRLLQQEVFTPEGKEGLANLLAAIAESETHKIFLKNDLGLTEISQQIYESWSLIEEAWNKQYDNKQKKVTETETYVDNRKKAFKSIKSFSIAEVEEWVKALGNEKHKGKSVATYFKSLGKTDEKVSLIEQVENNYNIIKDLLNTPYPPSKDLAQQKDDVEKIKNYLDSLKALQRFIKPLLGSGEESDKDAHFYGEFTAFWDVLDKVTPLYNKVRNYMTKKPYSTEKFKLNFENSYFLNGWAQDYETKAGLIFLKDGNYFLAINNKKLDEKEKKQLKTNYEKNPAKRIILDFQKPDNKNIPRLFIRSKGDNFAPAVEKYNLPISDVIDIYDEGKFKTEYRKINEPEYLKSLHKLIDYFKLGFSKHESYKHYSFSWKKTHEYENIAQFYHDVEVSCYQVLDENINWDSLMEYVEQNKLYLFQIYNKDFSPNSKGTPNMHTLYWKMLFNPDNLKDVVYKLNGQAEVFYRKASIKKENKIVHKANDPIDNKNELNKKKQNTFEYDIVKDKRYTVDKFQFHVPITLNFKAEGLNNLNSKVNEYIKECDDLHIIGIDRGERHLLYLSLIDMKGNIVKQFSLNEIVNEHKGNTYRTNYHNLLDKREKEREKERESWKTIETIKELKEGYISQVVHKITQLMIEYNAIVVLEDLNFGFKRGRFKVEKQVYQKFEKMLIDKLNYLVDKKKEANESGGTLKAYQLTDSYADFMKYKKKQCGFLFYVPAWNTSKIDPTTGFVNLFDTHYVNVSKAQEFFSKFKSIRYNAANNYFEFEVTDYFSFSGKAEGTKQNWIICTHGTRIINFRNPEKNSQWDNKEVVITDEFKKLFEKHGIDYKNSSDLKGQIASQSEKAFFHNEKKDTKDPDGLLQLFKLALQMRNSFIKSEEDYLVSPVMNDEGEFFDSRKAQPNQPENADANGAYNIAMKGKWVVKQIRESEDLDKLKLAISNKEWLNFAQRS

SEQ ID NO: 116 - protein, 1300 aa, Acinetobacter sp.
MNFQPFFQKFVHLYPISKTLRFELIPQGATQKFISEKQVLLQDEIRARKYPEMKQAIDGYHKDFIQRALSNIDSQVFEQALNTFEDLFLRSQAERATDAYKKDFETAQTKLRELIVHSFEKGEFKQEYKSLFDKNLITNLLKPWVEQQNQIGDSNYTYHEDFNKFTTYFLGFHENRKNIYSKDPHKTALAYRLIHENLPKFLENNKILLKIQNDHPSLWEQLQTLNQTMPQLFDGWDFSQLMQVSFFSNTLTQTGIDQYNTIIGGISEGENRQKIQGINELINLYNQKQDKKNRVAKLKQLYKQILSDRSTLSFLPEKFVDDTELYHAINMFYLEHLHHQSMINGHSYTLLERVQLLINELANYDLSKVYLAPNQLSTVSHQMFGDFGYIGRALNYYYMQVIQPDYEQLLASAKTTKKIEATEKLKTIFLDTPQSLVVIQAAIDEYIQLQPSTKPHTQLTDFIISLLKQYETVADDQSIKVINVFSDIEGKYSCIKGLVNTKSESKREVLQDEKLATDIKAFMDAVNNVIKLLKPFSLNEKLVASVEKDARFYSDFEEIYQSLLIFVPLYNKVRNYITQKPYSTEKFKLNFNKPTLLSGWDANKEADNLSILLRKNGNYYLAIMDTAKGANKAFEPKTLNQLKVDDTTDCYEKMVYKLLSGPSKMFPKAFKAKNNEGNYYPTPELLTSYNNNEHLKNDKNFTLASLHAYIDWCKEYINRNPSWHQFNFKFSPTQSFQDISQFYSEVSSQSYKVHFQTIPSDYIDQLVAEGKLYLFQIYNKDFSPNAKGKENLHTLYFKALFSDENLKQPVFKLSGEAEMFYRPASLQLANTTIHKAGEPMAAKNPLTPNATRTLAYDIIKDRRFTTDKYLLHVPISLNFHAQESMSIKKHNDLVRQMIKHNHQDLHVIGIDRGEKHLLYVSVIDLKGNIVYQESLNSIKSEAQNFETPYHQLLQHREEGRAQARTAWGKIENIKELKDGYLSQVVHRIQQLILKYNAIVMLEDLNFGFKRGRFKIEKQIYQKFEKALIHKLNYVVDKSTQADELGGVRKAYQLTAPFESFEKLGKQSGVLFYVPAWNTSKIDPVTGFVDLLKPKYENLDKAQAFFNAFDSIHYNAQKNYFEFKVNLKQFAGLKAQAAQAEWTICSYGDERHVYQKKNAQQGETVIVNVTEELKVLFAKNNIEVAQSVELKETICTQTQVDFFKRLMWLLQVLLALRYSSSKDKLDYILSPVANAQGEFFDSRHASVQLPQDSDANGAYHIALKGLWVIEQLKAADNLDKVKLAISNDDWLHFAQQKPYLA

SEQ ID NO: 117 - protein, 1300 aa, Francisella tularensis
MSIYQEFVNKYSLSKTLRFELIPQGKTLENIKARGLILDDEKRAKDYKKAKQIIDKYHQFFIEEILSSVCISEDLLQNYSDVYFKLKKSDDDNLQKDFKSAKDTIKKQISKYINDSEKFKNLFNQNLIDAKKGQESDLILWLKQSKDNGIELFKANSDITDIDEALEIIKSFKGWTTYFKGFHENRKNVYSSNDIPTSIIYRIVDDNLPKFLENKAKYESLKDKAPEAINYEQIKKDLAEELTFDIDYKTSEVNQRVFSLDEVFEIANFNNYLNQSGITKFNTIIGGKFVNGENTKRKGINEYINLYSQQINDKTLKKYKMSVLFKQILSDTESKSFVIDKLEDDSDVVTTMQSFYEQIAAFKTVEEKSIKETLSLLFDDLKAQKLDLSKIYFKNDKSLTDLSQQVFDDYSVISTAVLEYITQQVAPKNLDNPSKKEQELIAKKTEKAKYLSLETIKLALEEFNKHRDIDKQCRFEEILANFAAIPMIFDEIAQNKDNLAQISIKYQNQGKKDLLQASAEDDVKAIKDLLDQTNNLLHRLKIFHISQSEDKANILDKDEHFYLVFEECYFELANIVPLYNKIRNYITQKPYSDEKFKLNFENSTLANGWDKNKEPDNTAILFIKDDKYYLGVMNKKNNKIFDDKAIKENKGEGYKKIVYKLLPGANKMLPKVFFSAKSIKFYNPSEDILRIRNHSTHTKNGSPQKGYEKFEFNIEDCRKFIDFYKQSISKHPEWKDFGFRFSDTQRYNSIDEFYREVENQGYKLTFENISESYIDSVVNQGKLYLFQIYNKDFSAYSKGRPNLHTLYWKALFDERNLQDVVYKLNGEAELFYRKQSIPKKITHPAKETIANKNKDNPKKESVFEYDLIKDKRFTEDKFFFHCPITINFKSSGANKFNDEINLLLKEKANDVHILSIDRGERHLAYYTLVDGKGNIIKQDTFNIIGNDRMKTNYHDKLAAIEKDRDSARKDWKKINNIKEMKEGYLSQVVHEIAKLVIEHNAIVVFEDLNFGFKRGRFKVEKQVYQKLEKMLIEKLNYLVFKDNEFDKTGGVLRAYQLTAPFETFKKMGKQTGIIYYVPAGFTSKICPVTGFVNQLYPKYESVSKSQEFFSKFDKICYNLDKGYFEFSFDYKNFGDKAAKGKWTIASFGSRLINFRNSDKNHNWDTREVYPTKELEKLLKDYSIEYGHGECIKAAICGESDKKFFAKLTSVLNTILQMRNSKTGTELDYLISPVADVNGNFFDSRQAPKNMPQDADANGAYHIGLKGLMLLDRIKNNQEGKKLNLVIKNEEYFEFVQNRNN

SEQ ID NO: 118 - protein, 1277 aa, unidentified
  source 1..1277: note = Candidatus Saccharibacteria
MFDQFTNIYSLDKTLRFKLNPVGNTPDLLEQNQVLKKDQTIENSYQQAKPYLDELHRRLINEALTPENLRNFPFNEYAAAYEYIKEINRNRYSANNKKETAASNEWESKKSDFRKAVVDMLNQQADHWKQKYQDLEFNKGELERKGTNFLTSPAINKILKTEFPPEKEQELVDKGFPSLHVDEEENSGEKRYIFESFDKFATYLSRFQQTRQNLYTSEDKATAIATRVVANFTTFMQNIHEFRDKHSSIEDELNLSQDEKRIFEPVSYRHYVLQADIEEYNAVIGDINKRMKELRDQKHKNPNYKKTDYPLLSTLDKQILGLQEKEHQLIEDDEDVWPCVEELLNISEQHFPALQKSVNALSETFFEPELPNIYLKDKNVNTISNRWFVNGDDFLIRLPQKNKKKDEKDTPKIKTFISLQDVRTAIDDMEGVLFKDRFYEEGAISPDQSTWQQFLGIFQHELSNAMEEYYQSARSLREVKDADPAFDKEHHTPVIKEFADACLRVYRLLDYFALTHRQSSQIPDVFSTEFYEEFDAHFYEVNVPRYYNALRDYIAQVFYGEDKIKLNFGKGNLLGGWSESRRNGAQYCGYILRRPQTNTYYLAITDNPWILDTEKHSEIKDTSNGMYEKMEYSQLKAQTIYGPSYEGEFGVSYDTDKQNSTNQKIIERVKRLLQKNFVEQYPELQTIIDREYSDADALAREVSNQNLYRISFVPVSAEYIEQGRYEAKRGGYNHLYIFEITNKDLAKPHSGGNPNLHTSYFLHLFSQENLSNPVLKLSGNAEIFFRPGNHDLPTKTDSLGKQVTTHKRYSKDTLLFHLPVSINFKKGSMKPKQFNDITNQKIADQPKDNLNIIGIDRGEKHLVYYSVVDCHGRILDQGSLNEINGIDYHRLLDEREKERIKNRQSWEPIEDIKNLKKGYISHVVHALSRLAVEHNAIIVMEDLNMRFKQIRGGIEKGTYQRLERQLIDKLNYLVFKDRDARETGGILRGYQLTAPFESFEKMGKQTGTIFYTEAGYTSVTDPLTGFRKNIYLKNSDTVENLKQAINTFHTIEWDEQRESYYFRYDVADFSKSKDTPSRIWEVYANVPRIIRKKVDERWTAAPVNPNDLLAELLQTYDFENPYGDVLEQIRIKEEAGELKGEREFDGEQRNFYKSLVYIFNLILQLRNSMSHKYRVENDSVITEGEDLDFIASPVPPFFTTESSYSTANFGGFEQRFIGNPQAREKFMEEFNGDANGAYNIARKGVLLLDRVRENPSNPDIFITNQEWDRAATEWDTS

SEQ ID NO: 119 - protein, 1174 aa, unidentified
  REGION 1..1174: note = Sequence from GenBank assembly GCA_003063625.1
MFCLGNIAKWHKVTEFINQANNYELLQEHGIDWNKQIAALEHKLDVCLAEFFALNNFSQTLAQQGIEKYNQVLAGIAEIAGQPKTQGLNELINLARQKLSAKRSQLPTLQLLYKQILSKGDKPFIDDFKSDQELIAELNEFVSSQIHGEHGAIKLINHELESFINEARAAQQQIYVPKDKLTELSLLLTGSWQAINQWRYKLFDQKQLDKQQKQYSFSLAQVERWLATEVEQQNFYQTEKERQQHKDTQPANVTTSSDGHSILTAFEQQVQTLLTNICVAAEKYRQLSDNLTAIDKQRESESSKGFEQIAVIKTLLDACNELNHFLARFTVNKKDKLPEDRAEFWYEKLQAYIDAFPIYELYNKVRNYLSKKPFSTEKVKINFDNSHFLSGWTADYERHSALLFKFNENYLLGVVNENLSSEEEEKLKLVGGEEHAKRFIYDFQKIDNSNPPRVFIRSKGSSFAPAVEKYQLPIGDIIDIYDQGKFKTEHKKKNEAEFKDSLVRLIDYFKLGFSRHDSYKHYPFKWKASHQYSDIAEFYAHTASFCYTLKEENINFNVLRELSSAGKVYLFEIYNKDFSKNKRGQGRDNLHTSYWKLLFSAENLKDVVLKLNGQAEIFYRPASLAETKAYTHKKGEVLKHKAYSKVWEALDSPIGTRLSWDDALKIPSITEKTNHNNQRVVQYNGQEIGRKAEFAIIKNRRYSVDKFLFHCPITLNFKANGQDNINARVNQFLANNKKINIIGIDRGEKHLLYISVINQQGEVLHQESFNTITNSYQTANGEKRQVVTDYHQKLDMSEDKRDKARKSWSTIENIKELKAGYLSHVVHRLAQLIIEFNAIVALEDLNHGFKRGRFKIEKQVYQKFEKALIDKLSYLAFKDRTSCLETGHYLNAFQLTSKFKGFNNLGKQSGILFYVNADYTSTTDPLTGYIKNVYKTYSSVKDSTEFWQRFNSIRYIASENRFEFSYDLADLKQKSLESKTKQTPLAKTQWTVSSHVTRSYYNQQTKQHELFEVTARIQQLLSKAEISYQHQNDLIPALASCQSKALHKELIWLFNSILTMRVTDSSKPSATSENDFILSPVAPYFDSRNLNKQLPENGDANGAYNIARKGIMLLERIGDFVPEGNKKYPDLLIRNNDWQNFVQRPEMVNKQKKKLVKLKTEYSNGSLFNDLAFK

SEQ ID NO: 120 - protein, 1305 aa, Bacteroides galacturonicus; identical to SEQ ID NO: 60

SEQ ID NO: 121 - protein, 1278 aa, unidentified
  source 1..1278: note = Phycisphaerales bacterium
MDKFVRKYALSKTLRFELKPVGETAGKIEDFKNKTIASIVEQDKKRAEDYKKIKKIIDDYHRYFIEQVLVQEVLTGADIQKAFESYVAFRGSKDESKRKDYQAIQKNLRTKIAKAFKEQSDKYCLFDAGLLNEKGTGKNRTKGLLWIWLKHRLDNKQINQSEFEEAERLIKSFDRFSTYFTGFNQNRQNIYSAEEQQTAISYRIIHDNMVKHFNNCLSFQAIQQNHKDLAEQMKDCKDVFNPATFKSYLGQTGIDCYNEKIGHKPDDINAKGVNQLINEYCQKNSTKNDKIKLPKMAILYKQILSDVEDKFKIDVFETDRQMLETINQFYLDIKDNLESIKTCLGQYLAGNNLEKIYIKKDSLTDISQNLWGSWGFINFALEKYADEILRLNEKKKEKWVKQDTFSIGEIQKALDNYFDGCEEKTERKILAQYFVDFKNDEHNLIVSIENAYQQTAEILPLEKLDKDRREPKGNNNGGKGFLQVEKIKELLDSIMAVVQFVKPLYLIKSGKIIEVGDKCTDFYDTFDGLYRNVSACIGIYNKTRNYVTQKPYSTNKFKINFENSTLLDGWDVNKETANSGILLIKDGRYYLGIMRKDTTDIFNYMPESDDSAKKQQTKKLLKQQVIADGADDYYEKMIYKLLPDPAKMLPKVFFSDSNINSYAPSGEILEIREKGLYKKEAGNPKAISQWIDFLKESIKKHPEWGAYFSFIFSPTADYADTSEFYKEVAQQGYNISFDKIKASYINEKVKAGELYLFEIYNKDFSSYSKGKPNLHTSYWKLLFSPENLNDLVLKLNGQAEIFFRPTSINKSETPVHKAKQSINNKNQLNPKKQSSFDYDIVKDRRFTADKFFFHCPITLNFRSASIAGRFNDAVNGYLKDNPDVNIIGIDRGERHLLYYSVINKNGQIVEQASFNTVANSYNSDGRDIDVKTDYHKLLDEKEKQRDAARKSWSTIENIKELKSGYLSHIVHNLASLMIKYNAVIILEDLNFGFKRGRFKVEKQVYQKFEQALIDKLNYLVFKNSKAGQAGHYLNAYQLTAPFESFQKLGKQSGFLFYVLSHYTSKIDPVTGFVNLLDTTYASVEKSQKFFKKFDGIIFNAKKNYFEFSFNYANFPPDKSGSKKDWAVCTAGKERYRHDKQKKESVCYDVTAELIKLFDKYGISYKNGENLVNVISNNDKTEFFKNLLFYLGLTLQLRHSYKDGDEEKDFILSPVADKDGNFFDSRKAKENQPKDADANGAFNIARKGLMVLRQIRCPDIGKPDVIKNADWFNFAQSGR

SEQ ID NO: 122 - protein, 1263 aa, Eubacterium rectale
MNNGTNNFQNFIGISSLQKTLGNALIPTETTQQFIVKNGIIKEDELRGENRQILKDIMDDYYRGFISETLSSIDDIDWTSLFEKMEIQLKHGDNKDTLIKEQAEKRKAIYKKFADDDRFKNMFSAKLISDILPEFVIHNNNYSASEKEEKTQVIKLFSRFATSFKDYFKNRANCFSADDISSSSCHRIVNDNAEIFFSNALVYRRIVKNLSNDDINKISGDMKDSLKEMSLEEIYSYEKYGKFITQEGISFYNDICGKVNSFMNLYCQKNKENKNLYKLRKLHKQILCIADTSYEVPYKFESDEEVYQSVNGFLDNISSKHIVERLRKIGDNYNGYNLDKIYIVSKFYESVSQKTYRDWETINTALEIHYNNILPGNGKSKADKVKKAVKNDLQKSITEINELVSNYKLCPDDNIKAETYIHEISHILNNFEAQELKYNPEIHLVESELKASELKNVLDVIMNAFHWCSVFMTEELVDKDNNFYAELEEIYDEIYPVISLYNLVRNYVTQKPYSTKKIKLNFGIPTLADGWSKSKEYSNNAIILMHDNLYYLGIFNAKNKPDKKIIEGNTSENKGDYKKMIYNLLPGPNKMIPKVFLSSKTGVETYKPSAYILEGYKQNKHLKSSKDFDITFCHDLIDYFKNCIAIHPEWKNFGFDFSDTSTYEDISGFYREVELQGYKIDWTYISEKDIDLLQEKGQLYLFQIYNKDFSKKSTGNDNLHTMYLKNLFSEENLKDIVLKLNGEAEIFFRKSSIKNPIIHKKGSILVNRTYEAEEKDQFGNIQIVRKTIPENIYQELYKYFNDKSDKELSDEAAKLKNVVGHHEAATNIVKDYRYTYDKYFLHMPITINFKANKTSFINDRILQYIAKEKDLHVIGIDRGERNLIYVSVIDTCGNIVEQKSFNIVNGYDYQIKLKQQEGARQIARKEWKEIGKIKEIKEGYLSLVIHEISKMVIKYNAIIAMEDLSYGFKKGRFKVERQVYQKFETMLINKLNYLVFKDISITENGGLLKGYQLTYIPEKLKNVGHQCGCIFYVPAAYTSKIDPTTGFVNIFKFKDLTVDAKREFIKKFDSIRYDSEKNLFCFTFDYNNFITQNTVMSKSSWSVYTYGVRIKRRFVNGRFSNESDTIDITKDMEKTLEMTDINWRDGHDLRQDIIDYEIVQHIFEIFRLTVQMRNSLSELEDRDYDRLISPVLNENNIFYDSAKAGDALPKDADANGAYCIALKGLYEIKQITENWKEDGKFSRDKLKISNKDWFDFIQNKRYL

SEQ ID NO: 123 - protein, 1263 aa, Eubacterium rectale
MNNGTNNFQNFIGISSLQKTLRNALIPTETTQQFIVKNGIIKEDELRGENRQILKDIMDDYYRGFISETLSSIDDIDWTSLFEKMEIQLKNGDNKDTLIKEQAEKRKAIYKKFADDDRFKNMFSAKLISDILPEFVIHNNNYSASEKEEKTQVIKLFSRFATSFKDYFKNRANCFSADDISSSSCHRIVNDNAEIFFSNALVYRRIVKNLSNDDINKISGDMKDSLKEMSLEKIYSYEKYGEFITQEGISFYNDICGKVNSFMNLYCQKNKENKNLYKLRKLHKQILCIADTSYEVPYKFESDEEVYQSVNGFLDNISSKHIVERLRKIGDNYNGYNLDKIYIVSKFYELVSQKTYRDWETINTALEIHYNNILPGNGKSKADKVKKAVKNDLQKSITEINELVSNYKLCPDDNIKAETYIHEISHILNNFEAQELKYNPEIHLVESELKASELKNVLDVIMNAFHWCSVFMTEELVDKDNNFYAELEEIYDEIYPVISLYNLVRNYVTQKPYSTKKIKLNFGIPTLADGWSKSKEYSNNAIILMRDNLYYLGIFNAKNKPDKKIIEGNTSENKGDYKKMIYNLLPGPNKMIPKVFLSSKTGVETYKPSAYILEGYKQNKHLKSSKDFDITFCRDLIDYFKNCIAIHPEWKNFGFDFSDTSTYEDISGFYREVELQGYKIDWTYISEKDIDLLQEKGQLYLFQIYNKDFSKKSTGNDNLHTMYLKNLFSEENLKDIVLKLNGEAEIFFRKSSIKNPIIHKKGSILVNRTYEAEEKDQFGNIQIVRKTIPENIYQELYKYFNDKSDKELSDEAAKLKNVVGHHEAATNIVKDYRYTYDKYFLHMPITINFKANKTSFINDRILQYIAKEKDLHVIGIDRGERNLIYVSVIDTCGNIVEQKSFNIVNGYDYQIKLKQQEGARQIARKEWKEIGKIKEIKEGYLSLVIHEISKMVIKYNAIIAMEDLSYGFKKGRFKVERQVYQKFETMLINKLNYLVFKDISITENGGLLKGYQLTYIPEKLKNVGHQCGCIFYVPAAYTSKIDPTTGFVNIFKFKDLTVDAKREFIKKFDSIRYDSEKNLFCFTFDYNNFITQNTVMSKSSWSVYTYGVRIKRRFVNGRFSNESDTIDITKDMEKTLEMTDINWRDGHDLRQDIIDYEIVQHIFEIFRLTVQMRNSLSELEDRDYDRLISPVLNENNIFYDSAKAGDALPKDADANGAYCIALKGLYEIKQITENWKEDGKFSRDKLKISNKDWFDFIQNKRYL

SEQ ID NO: 124 - protein, 1245 aa, Phocaeicola sp.
METFSGFTNLYPLSKTLRFRLIPVGETLKYFIGSGILEEDQHRAESYVKVKAIIDDYHRAYIENSLSGFELPLESTGKFNSLEEYYLYHNIRNKTEEIQNLSSKVRTNLRKQVVAQLTKNEIFKRIDKKELIQSDLIDFVKNEPDANEKIALISEFRNFTVYFKGFHENRRNMYSDEEKSTSIAFRLIHENLPKFIDNMEVFAKIQNTSISENFDAIQKELCPELVTLCEMFKLGYFNKTLSQKQIDAYNTVIGGKTTSEGKKIKGLNEYINLYNQQHKQEKLPKMKLLFKQILSDRESASWLPEKFENDSQVVGAIVNFWNTIHDTVLAEGGLKTIIASLGSYGLEGIFLKNDLQLTDISQKATGSWGKISSEIKQKIEVMNPQKKKESYETYQERIDKIFKSYKSFSLAFINECLRGEYKIEDYFLKLGAVNSSSLQKENHFSHILNTYTDVKEVIGFYSESTDTKLIRDNGSIQKIKLFLDAVKDLQAYVKPLLGNGDETGKDERFYGDLIEYWSLLDLITPLYNMVRNYVTQKPYSVDKIKINFQNPTLLNGWDLNKETDNTSVILRRDGKYYLAIMNNKSRKVFLKYPSGTDRNCYEKMEYKLLPGANKMLPKVFFSKSRINEFMPNERLLSNYEKGTHKKSGTCFSLDDCHTLIDFFKKSLDKHEDWKNFGFKFSDTSTYEDMSGFYKEVENQGYKLSFKPIDATYVDQLVDEGKIFLFQIYNKDFSEHSKGTPNMHTLYWKMLFDETNLGDVVYKLNGEAEVFFRKASINVSHPTHPANIPIKKKNLKHKDEERILKYDLIKDKRYTVDQFQFHVPITMNFKADGNGNINQKAIDYLRSASDTHIIGIDRGERNLLYLVVIDGNGKICEQFSLNEIEVEYNGEKYSTNYHDLLNVKENERKQARQSWQSIANIKDLKEGYLSQVIHKISELMVKYNAIVVLEDLNAGFMRGRQKVEKQVYQKFEKKLIEKLNYLVFKKQSSDLPGGLMHAYQLANKFESFNTLGKQSGFLFYIPAWNTSKMDPVTGFVNLFDVKYESVDKAKSFFSKFDSIRYNVERDMFEWKFNYGEFTKKAEGTKTDWTVCSYGNRIITFRNPDKNSQWDNKEINLTENIKLLFERFGIDLSSNLKDEIMQRTEKEFFIELISLFKLVLQMRNSWTGTDIDYLVSPVCNENGEFFDSRNVDETLPQNADANGAYNIARKGMILLDKIKKSNGEKKLALSITNREWLSFAQGCCKNG

SEQ ID NO: 125 - protein, 1263 aa, Eubacterium rectale
MNNGTNNFQNFIGISSLQKTLRNALIPTETTQQFIVKNGIIKEDELRGENRQILKDIMDDYYRGFISETLSSIDDIDWTSLFEKMEIQLKNGDNKDTLIKEQAEKRKAIYKKFADDDRFKNMFSAKLISDILPEFVIHNNNYSASEKEEKTQVIKLFSRFATSFKDYFKNRANCFSADDISSSSCHRIVNDNAEIFFSNALVYRRIVKNLSNDDINKISGDMKDSLKEMSLEEIYSYEKYGEFITQEGISFYNDICGKVNLFMNLYCQKNKENKNLYKLRKLHKQILCIADTSYEVPYKFESDEEVYQSVNGFLDNISSKHIVERLRKIGENYNGYNLDKIYIVSKFYESVSQKTYRDWETINTALEIHYNNILPGNGKSKADKVKKAVKNDLQKSITEINELVSNYKLCPDDNIKAETYIHEISHILNNFEAQELKYNPEIHLVESELKASELKNVLDVIMNAFHWCSVFMTEELVDKDNNFYAELEEIYDEIYPVISLYNLVRNYVTQKPYSTKKIKLNFGIPTLADGWSKSKEYSNNAIILMRDNLYYLGIFNAKNKPDKKIIEGNTSENKGDYKKMIYNLLPGPNKMIPKVFLSSKTGVETYKPSAYILEGYKQNKHLKSSKDFDITFCHDLIDYFKNCIAIHPEWKNFGFDFSDTSTYEDISGFYREVELQGYKIDWTYISEKDIDLLQEKGQLYLFQIYNKDFSKKSSGNDNLHTMYLKNLFSEENLKDIVLKLNGEAEIFFRKSSIKNPIIHKKGSILVNRTYEAEEKDQFGNIQIVRKTIPENIYQELYKYFNDKSDKELSDEAAKLKNVVGHHEAATNIVKDYRYTYDKYFLHMPITINFKANKTSFINDRILQYIAKEKDLHVIGIDRGERNLIYVSVIDTCGNIVEQKSFNIVNGYDYQIKLKQQEGARQIARKEWKEIGKIKEIKEGYLSLVIHEISKMVIKYNAIIAMEDLSYGFKKGRFKVERQVYQKFETMLINKLNYLVFKDISITENGGLLKGYQLTYIPEKLKNVGHQCGCIFYVPAAYTSKIDPTTGFVNIFKFKDLTVDAKREFIKKFDSIRYDSEKKLFCFTFDYNNFITQNTVMSKSSWSVYTYGVRIKRRFVNGRFSNESDTIDITKDMEKTLEMTDINWRDGHDLRQDIIDYEIVQHIFEIFRLTVQMRNSLSELEDRDYDRLISPVLNENNIFYDSAKAGDALPKDADANGAYCIALKGLYEIKQITENWKEDGKFSRDRLKISNKDWFDFIQNKRYL

SEQ ID NO: 126 - protein, 1263 aa, Eubacterium rectale; identical to SEQ ID NO: 122

SEQ ID NO: 127 - protein, 1263 aa, Eubacterium rectale; identical to SEQ ID NO: 125

SEQ ID NO: 128 - protein, 1263 aa, Eubacterium rectale; identical to SEQ ID NO: 125

SEQ ID NO: 129 - protein, 1297 aa, unidentified
  source 1..1297: note = Deltaproteobacteria bacterium
MNAQKSFFGDFTNLYSLQKTLRFELEPQGKTLEHIENKGLISQDEQRAESYKKMKKTIDGFHKHFIEIAMSQVKLTKLKEFVDLYNASPERKKEDGFKKSFEKVQTELRKEIAMGFRAGEAKEIFSKIDKKELVTDLLEKWMQTQEEDLYFDESFKTFTTYFGGFHKNRKNMYTDKEQSTSIAYRLVHENLPKFLDNIKVFERIKSIPVLYEKCTTLYTEIKEHLDIKDINEAFNLYCYNKVLTQKQIDAYNLVIGGMTAQEGKKKIQGLNEHINLYNQRQDKKDRIPKLKQLYKQILSDRESVSFLPEAFEDDESKTASQKVLNSIEEYYQANLVSFHPRDKDEAENVLEKIKELLTSLKDYDSNKIYLRNDKAITDISKALFGDWGIIKVALEFAFLQTLKIGEKGLSKKQEKEKENYIKQSHFSVAEIEKALFAYKNEAEVLNDLHENTTPLADYFHTNFLAKKKEESDKEFDLIANIQAKYSCIKGILNRDYPKEKRLHQDKKTIGDIKAFLDSLMELLHFVKQLSLPSDTTLEKDEIFYSQFQPWYDQLQLLIPLYNKVRNYASQKPYSIEKFKLNFQSSTLAQGWDLNKEHNKNYSFIFQENDSFLLGIINIYDDKDILSKDTRPEIFVDDSPLKKMVYKNLGDIKRQLPRIAFSDKAKKCVEKIGWNQEIEAIKKEFDEFQDAKKNDKDLWKDEFDRNQLSELIDYYKGVLKNHSERYEDTYKLEYKSTESYKNLGEFFDHITSQTYKVTFVGIDKNYINRLVDQGKLYLFQIYNKDFSEYSKGKPNLHTLYWKALFDPENLKDVMYKLNGGAELFYRKKSIKDLAIHKANEPIKNKNPNNPKKESVFKYEIVKDYRYTVDKFHFHVPITLNFKATEAGYINNTILGFLKDNPDVNIIGIDRGERHLIYLTLIDQRGNILEQRSLNTIINKKFNVKTDYHGLLDNREKERDKARKNWGTIETIKELKEGYIGIIVHEISRMMVEHNAIVVMEDLNFGFKRGRFKVEKQIYQKLEKKLIDKLNYLIFKDKANNETGGLYKALQLTSKFESFIKLGKQSGFLFYVPAWNTSKIDPTTGFVNLFNTRYENADKAKTFFDNFENICYNVEKGYFEFKVKKYSLFNSKADDTRQEWIICTQGDRIRTFRNPEKSNQWDNKEIVLLDEFKNLFKEYGIRYEEDLKHQILSQTEKTFFEKLLNLFKITVQMRNSITNSETDYLISPVMNAKGEFYDSRKAGDNLPKDADANGAYHIAKKGLWLLKQIDAHEGEDWKKLKLAITNKEWLQFAQARGRL

SEQ ID NO: 130 - protein, 1282 aa, unidentified
  REGION 1..1282: note = Sequence from GenBank assembly GCA_003451515.1
MNGNRSIVYREFVGITPVAKTLRNELRPVGHTQEHIIQNGLIQEDELRQEKSTELKNIMDDYYREYIDKSLSRATDLDFSLLFELMNLVQSSPSKDNKKALEKEQSKMREQICTHLQSDSNYKNIFNAKLLKEILPDFIKNYNQYDVKDKAGKLETLALFNGFSTYFTDFFEKRKNVFTKEAVSTSMAYRIVHENSLIFLANMTSYKKISEKALNEIEVIEKDNQDKMGDWELNQIFNPDFYNMVLIQSGIDFYNEICGVVNAHMNLYCQQTKNNYNLFKMRKLHKQILAYTSTSFEVPKMFEDDMSVYNAVNAFIDETEKGNIIGKLKDIVNKYDELDEKRIYISKDFYETLSCFMSGNWNLITGCVENFYDENIHAKGKSKEEKVKKAVKEDKYKSINDVNDLVEKYIDEKERNEFKNSNAKQYIREISNIITDTETAHLEYDEHISLIESEEKADEMKKRLDMYMNMYHWAKAFIVDEVLDRDEMFYSDIDDIYNILENIVPLYNRVRNYVTQKPYNSKKIKLNFQSPTLANGWSQSKEFDNNAIILIRDNKYYLAIFNAKNKPDKKIIQGNSDKKNDNDYKKMVYNLLPGANKMLPKVFLSKKGIETFKPSDYIISGYNAYKHIKTSENFDISFCRDLIDYFKNSIEKHAEWRKYEFKFSATDSYNDISEFYREVEMQGYRIDWTYISEADINKLDEEGKIYLFQIYNKDFAENSTGKENLHTMYFKNIFSEENLKDIIIKLNGQAELFYRRASVKNPVKHKKGSVLVNKTYKNQLDNGDVVRIPIPDDIYNEIYKMYNGYIKESDLSEAAKEYLDKVEVRTAQKDIVKDYRYTVDKYFIHTPITINYKVTARNNVNDMAVKYIAQNDDIHVIGIDRGERNLIYISVIDSHGNIVKQKSYNILNNYDYKKKLVEKEKTREYARKNWKSIGNIKELKEGYISGVVHEIAMLMVEYNAIIAMEDLNYGFKRGRFKVERQVYQKFESMLINKLNYFASKGKSVDEPGGLLKGYQLTYVPDNIKNLGKQCGVIFYVPAAFTSKIDPSTGFISAFNFKSISTNASRKQFFMQFDEIRYCAEKDMFSFGFDYNNFDTYNITMGKTQWTVYTNGERLQSEFNNARRTGKTKSINLTETIKLLLEDNEINYADGHDVRIDMEKMDEDKNSEFFAQLLSLYKLTVQMRNSYTEAEEQEKGISYDKIISPVINDEGEFFDSDNYKESDDKECKMPKDADANGAYCIALKGLYEVLKIKSEWTEDGFDRNCLKLPHAEWLDFIQNKRYE

SEQ ID NO: 131 - protein, 1280 aa, unidentified
  REGION 1..1280: note = Sequence from GenBank assembly GCA_003457135.1
MNKFENFTGLYPISKTLRFELIPQGKTLEYIEKSEILENDNYRAEKYEEVKDIIDGYHKWFINETLHDLHINWSELKVALENNRIEKSDASKKELQRVQKIKREEIYNAFIEHEAFQYLFKENLLSDLLPIQIEQSEDLDAEKKKQAVETFNRFSTYFTGFHENRKNIYSKEGISTSVTYRIVHDNFPKFLENMKVFEILRNECPEVISDTANELAPFIDGVRIEDIFLIDFFNSTFSQNGIDYYNRILGGVTTETGEKYRGINEFTNLYRQQHPEFGKSKKATKMVVLFKQILSDRDTLSFIPEMFGNDKQVQNSIQLFYNREISQFENEGVKTDVCTALATLTSKIAEFDTEKIYIQQPELPNVSQRLFGSWNELNACLFKYAELKFGTAEKVANRKKIDKWLKSDLFSFTELNKALEFSGKDERIENYFSETGIFAQLVKTGFDEAQSILETEYTSEVHLKDQQTDIEKIKTFLDALQNLMHLLKSLCVSEEADRDAAFYNEFDMLYNQLKLVVPLYNKVRNYITQKLFRSDKIKIYFENKGQFLGGWVDSQTENSDNGTQAGGYIFRKENVINEYDYYLGICSDPKLFRRTTIVSENDRSSFERLDYYQLKTASVYGNSYCGKHPYTEDKNELVNSIDRFVHLSGNNILIEKIAKDKVKSNPTTNTPSGYLNFIHREAPNTYECLLQDENFVSLNQRVVSALKATLATLVRVPKALVYAKKDYHLFSEIINDIDELSYEKAFSYFPVSQTEFENSSNRTIKPLLLFKISNKDLSFAENFEKGNRQKIGKKNLHTLYFEALMKGNQDTIDIGTGMVFHRVKSLNYNEKTLKYGHHSTQLNEKFSYPIIKDKRFASDKFLFHLSTEINYKEKRKPLNNSIIEFLTNNPDINIIGLDRGERHLIYLTLINQKGEILRQKTFNIVGNTNYHEKLNQREKERDNARKSWATIGKIKELKEGFLSLVIHEIAKIMVENNAIVVLEDLNFGFKRGRFKVEKQIYQKFEKMLIDKLNYLVFKDKKANEAGGVLKGYQLAEKFESFQKMGKQSGFLFYVPAAYTSKIDPTTGFVNMLNLNYTNMKDAQTLLSGMDKISFNADANYFEFELDYEKFKTNQTDHTNKWTICTVGEKRFTYNSATKETTTVNVTEDLKKLLDKFEVKYSNGDNIKDEICRQTDAKFFEIILWLLKLTMQMRNSNTKTEEDFILSPVKNSNGEFFRSNDDANGIWPADADANGAYHIALKGLYLVKECFNKNEKSLKIEHKNWFKFAQTRFNGSLTKNG

SEQ ID NO: 132 - protein, 1245 aa, Phocaeicola sp.
METFSGFTNLYPLSKTLRFRLIPVGETLKHFIDSGILEEDQHRAESYVKVKAIIDDYHRAYIENSLSGFELPLESTGKFNSLEEYYLYHNIRNKTEEIQNLSSKVRTNLRKQVVAQLTKNEIFKRIDKKELIQSDLIDFVKNEPDANEKIALISEFRNFTVYFKGFHENRRNMYSDEEKSTSIAFRLIHENLPKFIDNMEVFAKIQNTSISENFDAIQKELCPELVTLCEMFKLGYFNKTLSQKQIDAYNTVIGGKTTSEGKKIKGLNEYINLYNQQHKQEKLPKMKLLFKQILSDRESASWLPEKFENDSQVVGAIVNFWNTIHDTVLAEGGLKTIIASLGSYGLEGIFLKNDLQLTDISQKATGSWGKISSEIKQKIEVMNPQKKKESYETYQERIDKIFKSYKSFSLAFINECLRGEYKIEDYFLKLGAVNSSSLQKENHFSHILNTYTDVKEVIGLYSESTDTKLIQDNDSIQKIKQFLDAVKDLQAYVKPLLGNGDETGKDERFYGDLIEYWSLLDLITPLYNMVRNYVTQKPYSVDKIKINFQNPTLLNGWDLNKETDNTSVILRRDGKYYLAIMNNKSRKVFLKYPSGTDRNCYEKMEYKLLPGANKMLPKVFFSKSRINEFMPNERLLSNYEKGTHKKSGTCFSLDDCHTLIDFFKKSLDKHEDWKNFGFKFSDTSTYEDMSGFYKEVENQGYKLSFKPIDATYVDQLVDEGKIFLFQIYNKDFSEHSKGTPNMHTLYWKMLFDETNLGDVVYKLNGEAEVFFRKASINVSHPTHPANIPIKKKNLKHKDEERILKYDLIKDKRYTVDQFQFHVPITMNFKADGNGNINQKAIDYLRSASDTHIIGIDRGERNLLYLVVIDGNGKICEQFSLNEIEVEYNGEKYSTNYHDLLNVKENERKQARQSWQSIANIKDLKEGYLSQVIHKISELMVKYNAIVVLEDLNAGFMRGRQKVEKQVYQKFEKKLIEKLNYLVFKKQSSDLPGGLMHAYQLANKFESFNTLGKQSGFLFYIPAWNTSKMDPVTGFVNLFDVKYESVDKAKSFFSKFDSIRYNVERDMFEWKFNYGEFTKKAEGTKTDWTVCSYGNRIITFRNPDKNSQWDNKEINLTENIKLLFERFGIDLSSNLKDEIMQRTEKEFFIELISLFKLVLQMRNSWTGTDIDYLVSPVCNENGEFFDSRNVDETLPQNADANGAYNIARKGMILLDKIKKSNGEKKLALSITNREWLSFAQGCCKNG

SEQ ID NO: 133 - protein, 1245 aa, Phocaeicola sp.; identical to SEQ ID NO: 132

SEQ ID NO: 134 - protein, 1263 aa, Eubacterium rectale; identical to SEQ ID NO: 15

SEQ ID NO: 135 - protein, 1263 aa, Eubacterium rectale
MNNGTNNFQNFIGISSLQKTLRNALIPTETTQQFIVKNGIIKEDELRGENRQILKDIMDDYYRGFISETLSSIDDIDWTSLFEKMEIQLKNGDNKDTLIKEQAEKRKAIYKKFANDDRFKNMFSAKLISDILPEFVIHNNNYSASEKEEKTQVIKLFSRFATSFKDYFKNRANCFSADDISSSSCHRIVNDNAEIFFSNALVYRRIVKNLSNDDINKISGDIKVSLKEMSLEEIYSYEKYGEFITQEGISFYNDICGKVNLFMNLYCQKNKENKNLYKLRKLHKQILCIADTSYEVPYKFESDEEVYQSVNGFLDNISSKHIVERLRKIGDNYNGYNLDKIYIVSKFYESVSQKTYRDWETINTALEIHYNNILPGNGKSKADKVKKAVKNDLQKSITEINELVSNYKLCPDDNIKAETYIHEISHILNNFEAQELKYNPEIHLVESELKASELKNVLDVIMNAFHWCSVFMTEELVDKDNNFYAELEEIYDEIYPVISLYNLVRNYVTQKPYSTKKIKLNFGIPTLADGWSKSKEYSNNAIILMHDNLYYLGIFNAKNKPDKKIIEGNTSENKGDYKKMIYNLLPGPNKMIPKVFLSSKTGVETYKPSAYILEGYKQNKHLKSSKDFDITFCHDLIDYFKNCIAIHPEWKNFGFDFSDTSTYEDISGFYREVELQGYKIDWTYISEKDIDLLQEKGQLYLFQIYNKDFSKKSTGNENLHTMYLKNLFSEENLKDIVLKLNGEAEIFFRKSSIKNPIIHKKGSILVNRTYEAEEKDQFGNIQIVRKTIPENIYQELYKYFNDKSDKELSDEAAKLKNVVGHHEAATNIVKDYRYTYDKYFLHMPITINFKANKTSFINDRILQYIAKEKDLHVIGIDRGERNLIYVSVIDTCGNIVEQKSFNIVNGYDYQIKLKQQEGARQIARKEWKEIGKIKEIKEGYLSLVIHEISKMVIKYNAIIAMEDLSYGFKKGRFKVERQVYQKFETMLINKLNYLVFKDISITENGGLLKGYQLTYIPEKLKNVGHQCGCIFYVPAAYTSKIDPTTGFVNIFKFKDLTVDAKREFIKKFDSIRYDSEKNLFCFTFDYNNFITQNTVMSKSSWSVYTYGVRIKRRYVNGRFSNESDTIDITKDMEKTLEMTDINWRDGHDLRQDIIDYEIVQHIFEIFRLTVQMRNSLSELEDRDYDRLISPVLNENNIFYDSAKAGDALPKDADANGAYCIALKGLYEIKQITENWKEDGKFSRDKLKISNKDWFDFIQNKRYL

SEQ ID NO: 136 - protein, 1263 aa, Eubacterium rectale; identical to SEQ ID NO: 135

SEQ ID NO: 137 - protein, 1263 aa, Eubacterium rectale; identical to SEQ ID NO: 123

SEQ ID NO: 138 - protein, 1263 aa, Eubacterium rectale; identical to SEQ ID NO: 123

SEQ ID NO: 139 - protein, 1263 aa, Eubacterium rectale; identical to SEQ ID NO: 122

SEQ ID NO: 140 - protein, 1245 aa, unidentified
  REGION 1..1245: note = Sequence from GenBank assembly GCA_003460445.1
MQEHKKISHLTHRNSVQKTIRMQLNPVGKTMDYFQAKQILENDEKLKEDYQKIKEIADRFYRNLNEDVLSKTGLDKLKDYAEIYYHCNTDADRKRLDECASELRKEIVKNFKNRDEYNKLFNKKMIEIVLPQHLKNEDEKEVVASFKNFTTYFTGFFTNRKNMYSDGEESTAIAYRCINENLPKHLDNVKAFEKAISKLSKNAVDDLDTTYSGLCGTNLYDVFTVDYFNFLLPQSGITEYNKIIGGYTTSDGTKVKGINEYINLYNQQVSKRYKIPNLKILYKQILSESEKVSFIPPKFEDDNELLSAVSEFYANDETFDGMPLKKAIDETKLLFGNLDNSSLNGIYIQNDRSVTNLSNSMFGSWSVIEDLWNKNYDSVNSNSRIKDIQKREDKRKKAYKAEKKLSLSFLQVLISNSENDEIREKSIVDYYKTSLMQLTDNLSDKYKEAAPLFNESYANEKGLKNDDKSISLIKNFLDAIKEIEKFIKPLSETNITGEKNDLFYSQFTPLLDNISRIDILYDKVRNYVTQKPFSTDKIKLNFGNSQLLNGWDRNKEKDCGAVWLCKDEKYYLAIIDKSNNSILENIDFQDCDESDCYEKIIYKLLPGPNKMLPKVFFSEKCKKLLSPSDEILKIRKNGTFKKGDKFSLDDCHKLIDFYKESFKKYPNWLIYNFKFKKTNEYNDISEFYNDVASQGYNISKMKIPTSFIDKLVDEGKIYLFQLYNKDFSPHSKGTPNLHTLYFKMLFDERNLEDVVYKLNGEAEMFYRPASIKYDKPTHPKNTPIKNKNTLNDKRASTFPYDLIKDKRYTKWQFSLHFPITMNFKAPDRAMINDDVRNLLKSCNNNFIIGIDRGERNLLYVSIIDSNGAIIYQHSLNIIGNKFKGKTYETNYREKLETREKERTEQRRNWKAIESIKELKEGYISQAVHVICQLVVKYDAIIVMEKLTDGFKRGRTKFEKQVYQKFEKMLIDKLNYYVDKKLDPDEEGGLLHAYQLTNKLESFDKLGMQSGFIFYVRPDFTSKIDPVTGFVNLLYPRYENIDKAKDMISRFDDIRYNAGEDFFEFDIDYDKFPKTASDYRKKWTICTNGERIEAFRNPASNNEWSYRTIILAEKFKELFDNNSINYRDSDNLKAEILSQTKGKFFEDFFKLLRLTLQMRNSNPETGEDRILSPVKDKNGNFYDSSKYDEKSNLPCDADANGAYNIARKGLWIVEQFKKSDNVSTVEPVIHNDKWLKFVQENDMANN

SEQ ID NO: 141 - protein, 1245 aa, unidentified
  REGION 1..1245: note = Sequence from GenBank assembly GCA_003461945.1
MQERKKISHLTHRNSVLKTIGMQLNPVGKTMDYFQAKQILENDEKLKEDYQKIKEIADRFYRNLNEDVLSKTGLDKLKDYAEIYYHCNTDADRKRLNKCASELRKEIVKNFKNRDEYNKLFDKRMIEIVLPKHLKNEDEKEVVASFKNFTTYFTGFFTNRKNMYSDGEESTAIAYRCINENLPKHLDNVKAFEKAISKLSKNAIDDLDATYSGLCGTNLYDVFTVDYFNFLLPQSGITEYNKIIGGYTTSDGTKVKGINEYINLYNQQVSKRDKIPNLQILYKQILSESEKVSFIPPKFEDDNELLSAVSEFYANDETFDEMPLKKAIDETKLLFGNLDNSSLNGIYIQNDRSVTNLSNSMFGSWSVIEDLWNKNYDSVNSNSRIKDIQKREDKRKKAYKAEKKLSLSFLQVLISNSENNEIREKSIVDYYKTSLMQLTDNLSDKYNEVAPLLNENYSNEKGLKNDDKSISLIKNFLDAIKEIEKFIKPLSETNITGEKNDLFYSQFTPLLDNISRIDILYDKVRNYVTQKPFSTDKIKLNFGNYQLLNGWDKDKEREYGAVLLCRDEKYYLAIIDKSNNRILENIDFQDCDESDCYEKIIYKLLPTPNKMLPKVFFAKKHKKLLSPSDEILKIRKNGTFKKGDKFSLDDCHKLIDFYKESFKKYPNWLIYNFKFKKTNEYNDIREFYNDVALQGYNISKMKIPTSFIDKLVDEGKIYLFQLYNKDFSPHSKGTPNLHTLYFKMLFDERNLEDVVYKLNGEAKMFYRPASIKYDKPTHPKNTPIKNKNTLNDKKASTFPYDLIKDKRYTKWQFSLHFSITMNFKAPDKAMINDDVRNLLKSCNNNFIIGIDRGERNLLYVSVIDSNGAIIYQHSLNIIGNKFKGKTYETNYREKLATREKERTEQRRNWKAIESIKELKEGYISQAVHVICQLVVKYDAIIVMEKLTDGFKRGRTKFEKQVYQKFEKMLIDKLNYYVDKKLDPDEEGGLLHAYQLTNKLESFDKLGTQSGFIFYVRPDFTSKIDPVTGFVNLLYPRYENIDKAKDMISRFDDIRYNAGEDFFEFDIDYDKFPKTASDYRKKWTICTNGERIEAFRNPANNNEWSYRTIILAEKFKELFDNNSINYRDSDDLKAEILSQTKGKFFEDFFKLLRLTLQMRNSNPETGEDRILSPVKDKNGNFYDSSKYDEKSKLPCDADANGAYNIARKGLWIVEQFKKSDNVSTVEPVIHNDKWLKFVQENDMANN

SEQ ID NO: 142 - protein, 1245 aa, unidentified
  REGION 1..1245: note = Sequence from GenBank assembly GCA_003462185.1
MQEHKKISHLTHRNSVQKTIRMQLNPVGKTMDYFQAKQILENDEKLKENYQKIKEIADRFYRNLNEDVLSKTRLDKLKDYTDIYYHCNTDADRKRLDECASELRKEIVKNFKNRDEYNKLFNKKMIEIVLPKHLKNEDEKEVVTSFKNFTTYFTGFFTNRKNMYSDGEESTAIAYRCINENLPKHLDNVKAFEKAISKLSKNAIDDLDTTYSGLCGTNLYDVFTVDYFNFLLPQSGITEYNKIIGGYTTNDGTKVKGINEYINLYNQQVSKRDKIPNLKILYKQILSESEKVSFIPPKFEDDNELLSAVSEFYANDETFDGMPLKKAIDETKLLFGNLDNPSLNGIYIQNDRSVTNLSNSMFGSWSVIEDLWNKNYDSVNSNSRIKDIQKREDKRKKAYKAEKKLSLSFLQVLISNSENDEIREKSIVDYYKTSLMQLTDNLSDKYNEAAPLLNENYSNEKGLKNDDKSISLIKNFLDAIKEIEKFIKPLSETNITGEKNDLFYSQFTPLLDNISRIDILYDKVRNYVTQKPFSTDKIKLNFGNSQLLNGWDRNKEKDCGAVWLCKDEKYYLAIIDKSNNSILENIDFQDCDESDCYEKIIYKLLPGPNKMLPKVFFSEKCKKLLSPSDEILKIYKSGTFKTGDKFSLDDCHKLIDFYKESFKKYPNWLIYNFKFKKTNEYNDIREFYNDVALQGYNISKMKIPTSFIDKLVDEGKIYLFQLYNKDFSPHSKGTPNLHTLYFKMLFDERNLEDVVYRLNGEAEMFYRPASIKYDKPTHPKNTPIKNKNTLNDKKTSTFPYDLIKDKRYTKWQFSLHFPITMNFKAPDKAMINDDVRNLLKSCNNNFIIGIDRGERNLLYVSVIDSNGAIIYQHSLNIIGNKFKEKTYETNYREKLATREKERTEQRRNWKAIESIKELKEGYISQAVHVICQLVVKYDAIIVMEKLTDGFKRGRTKFEKQVYQKFEKMLIDKLNYYVDKKLDPDEEGGLLHAYQLTNKLESFDKLGMQSGFIFYVRPDFTSKIDPVTGFVNLLYPQYENIDKAKDMISRFDEIRYNAGEDFFEFDIDYDEFPKTASDYRKKWTICTNGERIEAFRNPANNNEWSYRTIILAEKFKELFDNNSINYRDSDDLKAEILSQTKGKFFEDFFKLLRLTLQMRNSNPETGEDRILSPVKDKNGNFYDSSKYDEKSKLPCDADANGAYNIARKGLWIVEQFKKADNVSTVEPVIHNDQWLKFVQENDMANN

SEQ ID NO: 143 - protein, 1288 aa, unidentified
  REGION 1..1288: note = Sequence from GenBank assembly GCA_003461545.1
MVGNKISNSFDSFTGINALSKTLRNELIPSDYTKRHIAESDFIAADTNKNEDQYVAKEMMDDYYRDFISKVLDNLHDIEWKNLFELMHKAKIDKSDATSKELIKIQDMLRKKIGKKFSQDPEYKVMLSAGMITKILPKYILEKYETDREDRLEAIKRFYGFTVYFKEFWASRQNVFSDKAIASSISYRIIHENAKIYMDNLDAYNRIKQIACEEIEKIEEEAYVFLQGDQLDVVYTEEAYGRFISQSGIDLYNNICGVINAHMNLYCQSKKCSRSKFKMQKLHKQILCKAETGFEIPLGFQDDAQVINAINSFNALIKEKNIISRLRTIGKSISLYDVNKIYISSKAFENVSVYIDHKWDVIASSLYKYFSEIVKGNKDNREEKIQKEIKKVKSCSLGDLQRLVNSYYKIDSTCLEHEVTEFVTKIIDGIDNFQITDFKFNDKISLIQNEQIVMDIKTYLDKYMSIYHWMKSFVIDELVDKDMEFYSELDELNEDMSEIVNLYNKVRNYVTQKPYSQEKIKLNFGSPTLADGWSKSKEFDNNAIILIRDEKIYLAIFNPRNKPAKTVISGHDVCNSETDYKKMNYYLLPGASKTLPHVFIKSRLWNESHGIPDEILRGYELGKHLKSSVNFDVEFCWKLIDYYKECISCYPNYKAYNFKFADTESYNDISEFYREVECQGYKIDWTYISSEDVEQLDRDGQIYLFQIYNKDFAPNSKGMDNLHTKYLKNIFSEDNLKNIVIKLNGEAELFYRKSSVKKKVEHKKGTILVNKTYKVEDNTENSKEKRVIIESVPDDCYMELVDYWRNGGIGILSDKAVQYKDKVSHYEATMDIVKDRRYTVDKFFIHLPITINFKADGRININEKVLKYIAENDELHVIGIDRGERNLLYVSVINKKGKIVEQKSFNMIESYETVTNIVRRYNYKDKLVNKESARTDARKNWKEIGKIKEIKEGYLSQVIHEISKMVLKYNAIIVMEDLNYGFKRGRFRVERQVYQKFENMLISKLAYLVDKSRKADEPGGVLRGYQLTYIPDSLEKLGSQCGIIFYVPAAYTSKIDPLTGFVNVFNFREYSNFETKLDFVRSLDSIRYDTEKRLFSISFDYDNFKTHNTTLAKTKWVIYLRGERIKKEHTSYGWKDDVWNVESRIKDLFDSSHMKYDDGHNLIEDILELESSVQKKLINELIEIIRLTVQLRNSKSERYDRTEAEYDRIVSPVMDEKGRFYDSENYIFNEETELPKDADANGAYCIALKGLYNVIAIKNNWKEGEKFNRKLLSLNNYNWFDFIQNRRF

SEQ ID NO: 144 - protein, 1263 aa, Eubacterium rectale; identical to SEQ ID NO: 122

SEQ ID NO: 145 - protein, 1263 aa, Eubacterium rectale; identical to SEQ ID NO: 122

SEQ ID NO: 146 - protein, 1259 aa, Eubacterium ventriosum
MESNNKIFTETIGTSSIAKTMRNSLVPTESTKRNIEKNGIIIDDQLRAEKRQQLKEIMDEYYRTYIDNKLSNVALTRTIDWKELFQAIEDNYKQNTTKTKNELEKKQKEKRTEIYKILSDDEKFKQLFNAKLLTNVLPEFIKNQNIDNEEKQEKISTVELFQRFTSSFTDFFKNRKNVFSKDEISTSICYRVVQENAWIFYQNLLAFEEIKKTAEQEIEKIEAENRDSISDYSLKEIFDFDFYGLLLNQGGIRFYNDVCGKINYHMNLYGQKHNIKSNKFKMKRMHKQILSIDESTFEVPTMFENDKEVYQVLNEFLSDLASKKILERVEKIGENVSEYEINKIYIQSKNFEKFSSFMCGNWQIINDSLKTYYNEKIKSKGKAKEEKVKKAIKAIEYKSLADINQLVERYNNDELNRKAEEYISAINEKIKDLDVNEIEYDEKINLIENETKSEEIKSKLDSIMEIMHWTKMFIIEEEIEKDVNFYNEIEEIYDELQPLVTIYNRIRNYVTQKPYSEEKIKLNFGIPTLANGWSKTKEYDNNAIIMIRDGKYYLGIFNAKNKPDKKIMEGHQSEENGDYKKMIYRLLPGPNKMLPKVFMSKTGIAEYKPSQYILECYEQNKHIKSDKNFDIKFCRDLIDFFKTSINRHPEWSKFNFKFSETSEYEDISTFYREVEKQGYKIEWTYISEKEIKELDENGQLYLFQIYNKDFSEKSKGKENLHTMYLKNLFSEENLKNIVLKLNGEAEVFFRKSSIKKPIIHKKGSVLVNKTYNENGERKSIPEEQYTEIYKYLNSIGTNELSEKSKKLMEEGKVEYYKANYDIVKDYRYSVDKFFIHLPMTINFKAAGFSPINNIALKNIALKDDMHIIGIDRGERNLIYVSVIDTKGNIVEQRNFNIVNGIDYKEKLKQKELDRDNARKNWKEIGKIKDLKEGYLSLVVHEIAKLVVKYNAIITMEDLNQGFKRGRFKVERQVYQKFETMLINKLNYLVDKDLAVDQEGGLLRGYQLTYIPESLKVLGRQCGYIFYVPAAYTSKIDPTTGFVAIFNYKGMTDKDFVTSFDSIKYDDERGLFAFEFDYENFVTHKVEMARNKWTVYTYGERIKRKFKNGSWDTAEKVDLTYQMRSILEKYEIEYNKGQDILEQIEELDEKAQNGICKEIKYLVKDIVQMRNSLPDNAAEDYDAIISPVINNNGEFFDSTRGDEDKPLDADANGAYCIALKGLYEVMQIKKNWNEETEFPRKELKIRHQDWFDFIQNKRYL

SEQ ID NO: 147 - protein, 1259 aa, Eubacterium ventriosum
MESNNKIFTETIGTSSIAKTMRNSLVPTESTKRNIEKNGIIIDDQLRAEKRQQLKEIMDEYYRAYIDSKLSNVALTRTIDWKELFQAIENNYKQNTTKTKNELEKKQKEKRTEIYKILSDDEEFKQLFNAKLLTNILPEFIKNQNIDNEEKQEKISTVELFQRFTSSFTDFFKNRKNVFSKDEISTSICYRVVQENAWIFYQNLLAFEEIKKTAEQEIKKIEAENRDSISDYSLKEIFDFDFYGLLLNQGGIRFYNDVCGKINYHMNLYGQKHNIKSNKFKMKRMHKQILSIDESTFEVPTMFENDKEVYQVLNEFLSDLASKKILERVEKIGENVSEYEINKIYIQSKNFENFSSFMCGNWQIINDSLKTYYNEKIKSKGKAKVEKVKKAIKAIEYKSLADINQLVERYNHDELNRKAEEYISAINEKIKDLYVNEIEFDEKTNLIENETKSEEIKSKLDSIMEIMHWTKMFIIEEEIEKDVNFYNEIEEIYDELQPLVTIYNRIRNYVTQKPYSEEKIKLNFGIPTLANGWSKTKEYDNNAIIMIRDGKYYLGIFNAKNKPDKKIMEGHQSEENGDYKKMIYRLLPGPNKMLPKVFMSKTGIAEYKPSQYILECYEQNKHIKSDKNFDIKFCRDLIDFFKTSINRHPEWSKFNFKFSETSEYEDISTFYREVEKQGYKIEWTYISEKEIKELDENGQLYLFQIYNKDFSEKSKGKENLHTMYLKNLFSEENLKNIVLKLNGEAEVFFRKSSIKKPIIHKKGSVLVNKTYNENGERKSIPEEQYTEIYKYLNSIGTNELSEKSKKLMEEGKVEYYKANYDIVKDYRYSVDKFFIHLPMTINFKAAGFSPINNIALKSIALKEDMHIIGIDRGERNLIYVSVIDTKGNIVEQRNFNIVNGIDYKEKLKQKELDRDNARKNWKEIGKIKDLKEGYLSLVVHEIAKLVVKYNAIITMEDLNQGFKRGRFKVERQVYQKFETMLINKLNYLVDKDLAVDQEGGLLRGYQLTYIPESLKVLGRQCGYIFYVPAAYTSKIDPTTGFVAIFNYKGMTDKDFVTSFDSIKYDDERGLFAFEFDYENFVTHKVEMARNKWTVYTYGERIKRKFKNGLWDTAEKVDLTYQMRSILEKYEIEYNKGQDILEQIEELDEKAQNGICKEIKYLVKDIVQMRNSLPDNAVEDYDAIISPVINNNGEFFDSTRGDEDKPLDADANGAYCIALKGLYEVMQIKKNWNEETEFPRKELKIRHQDWFDFIQNKRYL

SEQ ID NO: 148 - protein, 816 aa, Eubacterium ventriosum
INLIENETKSEEIKSKLDSIMEIMHWTKMFIIEEEIEKDVNFYNEIEEIYDELQPLVTIYNRIRNYVTQKPYSEEKIKLNFGIPTLANGWSKTKEYDNNAIIMIRDGKYYLGIFNAKNKPDKKIMEGHQSEENGDYKKMIYRLLPGPNKMLPKVFMSKTGIAEYKPSQYILECYEQNKHIKSDKNFDIKFCRDLIDFFKTSINRHPEWSKFNFKFSETSEYEDISTFYREVEKQGYKIEWTYISEKEIKELDENGQLYLFQIYNKDFSEKSKGKENLHTMYLKNLFSEENLKNIVLKLNGEAEVFFRKSSIKKPIIHKKGSVLVNKTYNENGERKSIPEEQYTEIYKYLNSIGTNELSEKSKKLMEEGKVEYYKANYDIVKDYRYSVDKFFIHLPMTINFKAAGFSPINNIALKSIALKEDMHIIGIDRGERNLIYVSVIDTKGNIVEQRNFNIVNGIDYKEKLKQKELDRDNARKNWKEIGKIKDLKEGYLSLVVHEIAKLVVKYNAIITMEDLNQGFKRGRFKVERQVYQKFETMLINKLNYLVDKDLAVDQEGGLLRGYQLTYIPESLKVLGRQCGYIFYVPVAYTSKIDPTTGFVAIFNYKGMTDKDFVTSFDSIKYDDERGLFAFEFDYENFVTHKVEMARNKWTVYTYGERIKRKFKNGLWDTAEKVDLTYQMRSILEKYEIEYNKGQDILEQIEELDEKAQNGICKEIKYLVKDIVQMRNSLPDNAVEDYDAIISPVINNNGEFFDSTRGDEDKPLDADANGAYCIALKGLYEVMQIKKNWNEETEFPRKELKIRHQDWFDFIQNKRYL

SEQ ID NO: 149 - protein, 1259 aa, Eubacterium ventriosum; identical to SEQ ID NO: 146

SEQ ID NO: 150 - protein, 1263 aa, Eubacterium rectale; identical to SEQ ID NO: 135

SEQ ID NO: 151 - protein, 1245 aa, Phocaeicola sp.
METFSGFTNLYPLSKTLRFRLIPVGETLKHFIGSGILEEDQHRAESYVKVKAIIDDYHRTYIENSLSGFELPLESTGKFNSLEEYYLYHNIRNKTEEIQNLSSKVRTNLRKQVVTQLTKNEIFKRIDKKELIQSDLIDFVKNEPDANEKIALISEFRNFTVYFKGFHENRRNMYSDEEKSTSIAFRLIHENLPKFIDNMEVFAKIQNTSISENFDAIQKELCPELVTLCEMFKLGYFNKTLSQKQIDAYNTVIGGKTTSEGKKIKGLNEYINLYNQQHKQEKLPKMKLLFKQILSDRESASWLLEKFENDSQVVGAMVNFWNTIHDTVLAEGGLKTIIASLGSYGLEGIFLKNDLQLTDISQKATGSWSKISSEIKQKIEAMNPQKKKESYESYQERIDKLFKSYKSFSLAFVNECLRGEYKIEDYFLKLGAVNSSLLQKENHFSHILNTYTDVKEVIGFYSESTDTKLIQDNDSIQKIKQFLDAVKDLQAYVKPLLGNSDETGKDERFYGDLIEYWSLLDLITPLYNMVRNYVTQKPYSVDKIKINFQNPTLLNGWDLNKEMDNTSVILRRDGKYYLAIMNNKSRKVFLKYPSGTDRNCYEKMEYKLLPGANKMLPKVFFSKSRINEFMPNERLLSNYEKGTHKKSGTCFSLDDCHTLIDFFKKSLNKHEDWKNFGFKFSDTSTYEDMSGFYKEVENQGYKLSFKPIDATYVDQLVDEGKIFLFQIYNKDFSEHSKGTPNMHTLYWKMLFDETNLGDVVYKLNGEAEVFFRKASINVSHPTHPANIPIKKKNLKHKDEERILKYDLIKDKRYTVDQFQFHVPITMNFKANGNGNINQKAIDYLRSASDTHIIGIDRGERNLLYLVVIDGNGKICEQFSLNEIEVEYNGEKYSTNYHDLLNVKENERKQARQSWQSIANIKDLKEGYLSQVIHKISELMVKYNAIVVLEDLNAGFMRGRQKVEKQVYQKFEKKLIEKLNYLVFKKQSSDLPGGLMHAYQLANKFESFNTLGKQSGFLFYIPAWNTSKMDPVTGFVNLFDVKYESVDKAKSFFSKFDSIRYNVERDMFEWKFNYDEFTKKAEGTKTDWTVCSYGNRIITFRNPDKNSQWDNKEINLTENIKLLFERFGIDLSSNLKDEIMERTEKEFFIELISLFKLVLQMRNSWTGTDIDYLVSPVCNENGEFFDSRNVDETLPQNADANGAYNIARKGMILLDKIKKNNGEKKLTLSITNREWLSFAQGCCKNG

SEQ ID NO: 152 - protein, 1245 aa, Phocaeicola sp.
METFSGFTNLYPLSKTLRFRLIPVGETLKHFIDSGILEEDQHRAESYVKVKAIIDDYHRAYIENSLSGFELPLESTGKFNSLEEYYLYHNIRNKTEEIQNLSSKVRTNLRKQVVVQLTKNEIFKRIDKKELIQSDLIDFVKNEPDANEKIALISEFRNFTVYFKGFHENRRNMYSDEEKSTSIAFRLIHENLPKFIDNMEVFAKIQNTSISENFDAIQKELCPELVTLCEMFKLGYFNKTLSQKQIDAYNTVIGGKTTSEGKKIKGLNEYINLYNQQHKQEKLPKMKLLFKQILSDRESASWLPEKFENDSQVVGAMVNFWNTIHDTVLAEGGLKTIIASLGSYGLEGIFLKNDLQLTDISQKATGSWSKISSEIKQKIEVMNPQKKKESYESYQERIDKLFKSYKSFSLAFINECLRGEYKIEDYFLKLGAVNSSSLQKENHFSHILNAYTDVKEAIGFYSESTDTKLIQDNDSIQKIKQFLDAVKDLQAYVKPLLGNGDETGKDERFYGDLIEYWSLLDLITPLYNMVRNYVTQKPYSVDKIKINFQNPTLLNGWDLNKETDNTSVILRRDGKYYLAIMNNKSRKVFLKYPSGTDGNCYEKMEYKLLPGANKMLPKVFFSKSRINEFMPNERLLSNYEKGTHKKSGICFSLDDCHTLIDFFKKSLDKHEDWKNFGFKFSDTSTYEDMSGFYKEVENQGYKLSFKPIDATYVDQLVDEGKIFLFQIYNKDFSEHSKGTPNMHTLYWKMLFDETNLGDVVYKLNGEAEVFFRKASINVSHPTHPANIPIKKKNLKHKDEERILKYDLIKDKRYTVDQFQFHVPITMNFKADGNGNINQKAIDYLCSASDTHIIGIDRGERNLLYLVVIDGNGKICEQFSLNEIEVEYNGEKYSTNYHDLLNVKENERKQARQSWQSIANIKDLKEGYLSQVIHKISELMVKYNAIVVLEDLNAGFMRGRQKVEKQVYQKFEKKLIEKLNYLVFKKQSSDLPGGLMHAYQLANKFESFNALGKQSGFLFYIPAWNTSKMDPVTGFVNLFDVKYESVDKAKSFFSKFDSMRYNVERDMFEWKFNYGEFTKKAEGTKTDWTVCSYGNRIITFRNPDKNSQWDNKEINLTENIKLLFERFGIDLSSNLKDEIMQRTEKEFFIELISLFKLVLQMRNSWTGTDIDYLVSPVCNENGEFFDSRNVDETLPQNADANGAYNIARKGMILLDKIKKSNGEKKLALSITNREWLSFAQGCCKNG

SEQ ID NO: 153 - protein, 1263 aa, Eubacterium rectale
MNNGTNNFQNFIGISSLQKTLRNALIPTETTQQFIVKNGIIKEDELRGENRQILKDIMDDYYRGFISETLSSIDDIDWTSLFEKMEIQLKNGDNKDTLIKEQVEKRKAIYKKFADDDRFKNMFSAKLISDILPEFVIHNNNYSASEKEEKTQVIKLFSRFATSFKDYFKNRANCFSADDISSSSCHRIVNDNAEIFFSNALVYRRIVKNLSNDDINKISGDIKVSLKEMSLEEIYSYEKYGEFITQEGISFYNDICGKVNSFMNLYCQKNKENKNLYKLRKLHKQILCIADTSYEVPYKFESDEEVYQSVNGFLDNISSKHIVERLRKIGDNYNGYNLDKIYIVSKFYESVSQKTYRDWETINTALEIHYNNILPGNGKSKADKVKKAVKNDLQKSITEINELVSNYKLCPDDNIKAETYIHEISHILNNFEAQELKYNPEIHLVESELKASELKNVLDVIMNAFHWCSVFMTEELVDKDNNFYAELEEIYDEIYPVISLYNLVRNYVTQKPYSTQKIKLNFGIPTLADGWSKSKEYSNNAIILMRDNLYYLGIFNAKNKPDKKIIEGNTSENKGDYKKMIYNLLPGPNKMIPKVFLSSKTGVETYKPSAYILEGYKQNKHLKSSKDFDITFCHNLIDYFKNCISIHPEWKNFGFDFSDTSTYEDISGFYREVELQGYKIDWTYISEKDIDLLQEKGQLYLFQIYNKDFSKKSTGNDNLHTMYLKNLFSEENLKDIVLKLNGEAEIFFRKSSIKNPIIHKKGSILVNRTYEAEEKDQFGNIQIVRKTIPENIYQELYKYFNDKSDKELSDEAAKLKNVVGHHEAATNIVKDYRYTYDKYFLHMPITINFKANKTSFINDRILQYIAKEKDLHVIGIDRGERNLIYVSVIDTCGNIVEQKSFNIVNGYDYQIKLKQQEGARQIARKEWKEIGKIKEIKEGYLSLVIHEISKMVIKYNAIIAMEDLSYGFKKGRFKVERQVYQKFETMLINKLNYLVFKDISITENGGLLKGYQLTYIPEKLKNVGHQCGCIFYVPAAYTSKIDPTTGFVNIFKFKDLTVDAKREFIKKFDSIRYVSEKNLFCFTFDYNNFITQNTVMSKSSWSVYTYGVRIKRRFVNGRFSNESDTIDITKDMEKTLEMTDINWRDGHDLRQDIIDYEIVQHIFEIFRLTVQMRNSLSELEDRDYDRLISPVLNENNIFYDSAKAGDALPKDADANGAYCIALKGLYEIKQITENWKEDGKFSRDRLKISNKDWFDFIQNKRYL

SEQ ID NO: 154 - protein, 1259 aa, Eubacterium ventriosum
MESNNKIFTETIGTSSIAKTMRNSLVPTESTKRNIEKNGIIIDDQLRAEKRQQLKEIMDEYYRTYIDNKLSNVALTRTIDWKELFQAIEDNYKQNTTKTKNELEKKQKEKRTEIYKILSDDEKFKQLFNAKLLTNVLPEFIKNQNIDNEEKQEKISTVELFQRFTSSFTDFFKNRKNVFSKDEISTSICYRVVQENAWIFYQNLLAFEEIKKTAEQEIEKIEAENRDSISDYSLKEIFDFDFYGLLLNQGGIRFYNDVCGKINYHMNLYGQKHNIKSNKFKMKRMHKQILSIDESTFEVPTMFENDKEVYQVLNEFLSDLASKKILERVEKIGENVSEYEINKIYIQSKNFEKFSSFMCGNWQIINDSLKTYYNEKIKSKGKAKEEKVKKAIKAIEYKSLADINQLVERYNNDELNRKAEEYISAINEKIKDLDVNEIEYDEKINLIENETKSEEIKSKLDSIMEIMHWTKMFIIEEEIEKDVNFYNEIEEIYDELQPLVTIYNRIRNYVTQKPYSEEKIKLNFGIPTLANGWSKTKEYDNNAIIMIRDGKYYLGIFNAKNKPDKKIMEGHQSEENGDYKKMIYRLLPGPNKMLPKVFMSKTGIAEYKPSQYILECYEQNKHIKSDKNFDIKFCRDLIDFFKTSINRHPEWSKFNFKFSETSEYEDISTFYREVEKQGYKIEWTYISEKEIKELDENGQLYLFQIYNKDFSEKSKGKENLHTMYLKNLFSEENLKNIVLKLNGEAEVFFRKSSIKKPIIHKKGSVLVNKTYNENGERKSIPEEQYTEIYKYLNSIGTNELSEKSKKLMEEGKVEYYKANYDIVKDYRYSVDKFFIHLPMTINFKAAGFSPINNIALKNIALKDDMHIIGIDRGERNLIYVSVIDTKGNIVEQRNFNIVNEIDYKEKLKQKELDRDNARKNWKEIGKIKDLKEGYLSLVVHEIAKLVVKYNAIITMEDLNQGFKRGRFKVERQVYQKFETMLINKLNYLVDKDLAVDQEGGLLRGYQLTYIPESLKVLGRQCGYIFYVPAAYTSKIDPTTGFVAIFNYKGMTDKDFVTSFDSIKYDDERGLFAFEFDYENFVTHKVEMARNKWTVYTYGERIKRKFKNGSWDTAEKVDLTYQMRSILEKYEIEYNKGQDILEQIEELDEKAQNGICKEIKYLVKDIVQMRNSLPDNAAEDYDAIISPVINNNGEFFDSTRGDEDKPLDADANGAYCIALKGLYEVMQIKKNWNEETEFPRKELKIRHQDWFDFIQNKRYL

SEQ ID NO: 155 - protein, 1263 aa, Eubacterium rectale
MNNGTNNFQNFIGISSLQKTLRNALIPTETTQQFIVKNGIIKEDELRGENRQILKDIMDDYYRGFISETLSSIDDIDWTSLFEKMEIQLKNGDNKDTLIKEQAEKRKAIYKKFANDDRFKNMFSAKLISDILPEFVIHNNNYSASEKEEKTQVIKLFSRFATSFKDYFKNRANCFSADDISSSSCHRIVNDNAEIFFSNALVYRRIVKNLSNDDINKISGDMKDSLKEMSLEEIYSYEKYGEFITQEGISFYNDICGKVNSFMNLYCQKNKENKNLYKLRKLHKQILCIADTSYEVPYKFESDEEVYQSVNGFLDNISSKHIVERLRKIGDNYNGYNLDKIYIVSKFYELVSQKTYRDWETINTALEIHYNNILPGNGKSKADKVKKAVKNDLQKSITEINELVSNYKLCPDDNIKAETYIHEISHILNNFEAQELKYNPEIHLVESELKASELKNVLDVIMNAFHWCSVFMTEELVDKDNNFYAELEEIYDEIYPVISLYNLVRNYVTQKPYSTKKIKLNFGIPTLADGWSKSKEYSNNAIILMRDNLYYLGIFNAKNKPDKKIIEGNTSENKGDYKKMIYNLLPGPNKMIPKVFLSSKTGVETYKPSAYILEGYKQNKHLKSSKDFDITFCRDLIDYFKNCIAIHPEWKNFGFDFSDTSTYEDISGFYREVELQGYKIDWTYISEKDIDLLQEKGQLYLFQIYNKDFSKKSTGNDNLHTMYLKNLFSEENLKDIVLKLNGEAEIFFRKSSIKNPIIHKKGSILVNRTYEAEEKDQSGNIQIVRKTIPENIYQELYKYFNDKSDKELSDEVAKLKNVVGHHEAATNIVKDYRYTYDKYFLHMPITINFKANKTSFINDRILQYIAKEKDLHVIGIDRGERNLIYVSVIDTCGNIVEQKSFNIVNGYDYQIKLKQQEGARQIARKEWKEIGKIKEIKEGYLSLVIHEISKMVIKYNAIIAMEDLSYGFKKGRFKVERQVYQKFETMLINKLNYLVFKDISITENGGLLKGYQLTYIPDKLKNVGHQCGCIFYVPAAYTSKIDPTTGFVNIFKFKDLTVDAKREFIKKFDSIRYDSEKNLFCFTFDYNNFITQNTVMSKSSWSVYTYGVRIKRRFVNGRFSNESDTIDITKDMEKTLEMTDINWRDGHDLRQDIIDYEIVQHIFEIFRLTIQMRNSLSELEDRDYDRLISPVLNENNIFYDSAEAGDALPKDADANGAYCIALKGLYEIKQITENWKEDGKFSRDRLKISNKDWFDFIQNKRYL

SEQ ID NO: 156 - protein, 1259 aa, Eubacterium ventriosum
MESNNKIFTETIGTSSIAKTMRNSLVPTESTKRNIEKNGIIIDDQLRAEKRQQLKEIMDEYYRAYIDSKLSNVALTRTIDWKELFQAIENNYKQNTTKTKNELEKKQKEKRTEIYKILSDDEEFKQLFNAKLLTNILPEFIKNQNIDNEEKQEKISTVELFQRFTSSFTDFFKNRKNVFSKDEISTSICYRVVQENAWIFYQNLLAFEEIKKTAEQEIKKIEAENRDSISDYSLKEIFDFDFYGLLLNQGGIRFYNDVCGKINYHMNLYGQKHNIKSNKFKMKRMHKQILSIDESTFEVPTMFENDKEVYQVLNEFLSDLASKKILERVKKIGENVSEYEINKIYIQSKNFENFSSFMCGNWQIINDSLKAYYNETIKSKGKAKEEKVKKAIKAIEYKSLADIDELVEKYNKDELNRKAEEYISAINEKIKDLDMNEIEYDEKTNLIENETKSEEIKSKLDSIMEIMHWTKMFIIEEEIEKDVNFYNEIEEIYDELQPLVTIYNRIRNYVTQKPYSEEKIKLNFGIPTLANGWSKTKEYDNNAIIMIRDGKYYLGIFNAKNKPDKKIMEGHQSEENGDYKKMIYRLLPGPNKMLPKVFMSKTGIAEYKPSQYILECYEQNKHIKSDKNFDIKFCRDLIDFFKTSINRHPEWSKFNFKFSETSEYEDISTFYREVEKQGYKIEWTYISEKEIKELDENGQLYLFQIYNKDFSEKSKGKENLHTMYLKNLFSEENLKNIVLKLNGEAEVFFRKSSIKKPIIHKKGSVLVNKTYNENGERKSISEEQYTEIYKYLNSIGTNELSEKSKKLMEEGKVEYYKANYDIVKDYRYSVDKFFIHLPMTINFKAAGFSPINNIALKNIALKDDMHIIGIDRGERNLIYVSVIDTKGNIVEQRNFNIVNGIDYKEKLKQKELDRDNARKNWKEIGKIKDLKEGYLSLVVHEIAKLVVKYNAIITMEDLNQGFKRGRFKVERQVYQKFETMLINKLNYLVDKDLAVDQEGGLLRGYQLTYIPESLKVLGRQCGYIFYVPAAYTSKIDPTTGFVAIFNYKGMTDKDFVTSFDSIKYDDERGLFAFEFDYENFVTHKVEMARNKWTVYTYGERIKRNFKNGSWDTAEKVDLTYQMRSILEKYEIEYNKGQDILEQIEELDEKAQNGICKEIKYLVKDIVQMRNSLPDNAAEDYDAIISPVINNNGEFFDSTRGDEDKPLDADANGAYCIALKGLYEVMQIKKNWNEETEFPRKELKIRHQDWFDFIQNKRYL

SEQ ID NO: 157 - protein, 1296 aa, unidentified
  REGION 1..1296: note = Sequence from GenBank assembly GCA_003476125.1
MKGAKMGYENFINKNSCVKTLVNELRPTEWTRKHIEEDAILSADELRAEESDKLKSIMDDYYRRYIYTKLSGVSSLDWDELFSIMEVAYKSGKKDKNCKAQLEKVQEEMRGKFYNVLSDDDIFKMMFSGKFVTKVLPEFVRNNKEYSAEEKQQKLDTLKLFKGFTTSLVPFFNNRENIFSKKPIHSSICHRTVDENTAIFYQNIISYKNIEDNAPQEIEKIEHQGRQQLDEWKLPDIYSYSFYNNVLTQQGIEFYNDICGIVNSHMNLYCQQTKEKSGQYRMRKLYKQILSISSTSYEVPYKYEDDAQVYSSINEFVDRIFNSNFSAKVEKMLGKAEEYDFDKIYISSKNYSSISNFISGKWNTLDDCIRRYYEDNTVGNGDKKEKKVEEKVKKDSFRSLDSIDKVVEMYEKRGKSAKEYIYQIREIYSDNKLYKFGQDGSDTVKLIENDAKIERIKCVLDMLLNTNRFLDTFAVGDGEAVDVGFYSEIDELKEIIDGIEPLYNRVRNYVTRKPYNKNKIKLNFNSPTLAEGWSKSKEYDDNAIILRRDGKYYLGIFNVKNKPDKKIMEGYSGDVGDGYEKMVYSLLSNIHSNFPRIFIKSDECEKKYKLSQYIIDGYDNDRHIKSSKNFDIKFCHDLIDYFKASINANPDWKVFDFKFSDTKSYEDISGFYSEVEKQGYKISWVNISKEDIDRLDETGQIYLFQIYNKDFSESSMGTPNLHTLYFKNLFSEENIRETVLKLSGKGELFFRKASIDKPSGHRKGSILVNKTYKTNIGNEEVRVPIPDKEYMEIYTYLNNGRTTKLSENAQSLLDNKLVEYFEAEKEIIKDRRYTVDKFFIHTSVVINYNAEGASAKQLNEQVLDYISKQDDMHIIGIDRGERNLVYVSVIDMKGRIVEQKSYNVVNSYSYQKKLVEREKARDEARKSWKEVGRIKDLKDGYLSLVVHEIADMVIKYNAIIAMEDLNYGFKRGRFKIERQVYQKFESMLISKLSYLVDKTKKVDEPGGVLKGYQLAFVPKEVKKVGRQCGIIFYVPPAYTSKIDPATGFVDMFKFKSGEKEGTARADNDRKEFLSKFDCIRYVEKNDNREEMFAFTFDYDNFAMHNTVIAKKKWTAYTFGSRIQKVYENGRYTSSTREIQLTDKMKRLLNENNIEYGDGHNLVDDIRTLDVDSSGAVINEIFKIFRLTVQLRNSKSEAENEKNGEYDRIISPIMNDAGEFFDSFKYKKMNEETEPGKHNATMPIDADANGAYCIAMKCLYEAKNIKSGWEKEGKKNNDLLCVTNADWFDFMQNKRYV

SEQ ID NO: 158 - protein, 1249 aa, unidentified
  REGION 1..1249: note = Sequence from GenBank assembly GCA_003477365.1
MKKIDSFTNCYSLSKTLRFKLIPIGATQSNFDLNKMLDEDKKRAENYSKAKSIIDKYHRFFIDKVLSSVTENKAFDSFLEDVRAYAELYYRSNKDDSDKASMKTLESKMRKFIALALQSDEGFKDLFGQNLIKKTLPEFLESDTDKEIIAEFDGFSTYFTGFFNNRKNMYSADDQPTAISYRCINDNLPKILDNVRTFKNSDVANILNNNLKILNEDFDGIYGTSAEDVFNVDYFPFVLSQKGIEAYNSILGGYTNSDGSKIKGLNEYINLYNQKNGNIHRIPKMKQLFKQILSERESVSFIPEKFDSDDDVLSSINDYYLERDGGKVLSIEKTVEKIEKLFSAVTDYSTDGIFVKNAAELTAVCSGAFGYWGTVQNAWNNEYDALNGYKETEKYIDKRKKAYKSVESFSIADIQKYADVSESSETNAEVTEWLRNEIKEKCNLAVQGYESSKDLISKPYTESKKLFNNDNAVELIKNALDSVKELENVLRLLLGTGKEESKDENFYGEFLPCYERICEVDSLYDKVRNYMTQKLYKTDKIKLNFHNPQFLGGWDRNKEADYSAVLLRRNSLYYIAIMPSGYKRVFEKIPAPKADETVYEKVIYKLLPGPNKMLPKVFFSKKGIETFNPPKEILEKYELGTHKTGDGFNLDDCRALIDYFKSAIDVHSDWSNFGFRFSDTSTYKNIADFYNEVKNQGYKITFCDVPESYINELVDEGKLYLFQLYNKDFSEHSKGTPNLHTLYFKMLFDERNLENVVFKLNGEAEMFYREASISKDDMIVHPKNQPIKNKNEQNSRKQSTFEYDIVKDRRYTVDQFMLHIPITLNFTANGGTNINNEVRKALKDCDKNYVIGIDRGERNLLYICVVDSEGRIIEQYSLNEIINEYNGNTYSTDYHALLDKKEKERLESRKAWKTVENIKELKEGYISQVVHKICELVEKYDAVIVMEDLNFGFKQGRSGKFEKSVYQKFEKMLIDKLNYFADKKKSPEEIGSVLNAYQLTNAFESFEKMGKQNGFIFYVPAYLTSKIDPTTGFADLLHPSSKQSKESMRDFVGRFDSITFNKTENYFEFELDYNKFPRCNTDYRKKWTVCTYGSRIKTFRNPEKNSEWDNKTVELTPAFMALFEKYSIDVNGDIKAQIMSVDKKDFFVELIGLLRLTLQMRNSETGKVDRDYLISPVKNSEGVFYNSDDYKGIENASLPKDADANGAYNIARKGLWIIEQIKACENDAELNKIRLAISNAEWLEYAQKK

SEQ ID NO: 159 - protein, 1259 aa, unidentified
  REGION 1..1259: note = Sequence from GenBank assembly GCA_003478095.1
MNYKTGLEDFIGKESLSKTLRNALIPTESTKIHMEEMGVIRDDELRAEKQQELKEIMDDYYRAFIEEKLGQIQGIQWNSLFQKMEETMEDISVRKDLDKIQNEKRKEICCYFTSDKRFKDLFNAKLITDILPNFIKDNKEYTEEEKAEKEQTRVLFQRFATAFTNYFNQRRNNFSEDNISTAISFRIVNENSEIHLQNMRAFQRIEQQYPEEVCGMEEEYKDMLQEWQMKHIYLVDFYDRVLTQPGIEYYNGICGKINEHMNQFCQKNRINKNDFRMKKLHKQILCKKSSYYEIPFRFESDQEVYDALNEFIKTMKEKEIICRCVHLGQKCDDYDLGKIYISSNKYEQISNALYGSWDTIRKCIKEEYMDALPGKGEKKEEKAEAAAKKEEYRSIADIDKIISLYGSEMDRTISAKKCITEICDMAGQISTDPLVCNSDIKLLQNKEKTTEIKTILDSFLHVYQWGQTFIVSDIIEKDSYFYSELEDVLEDFEGITTLYNHVRSYVTQKPYSTVKFKLHFGSPTLANGWSQSKEYDNNAILLMRDQKFYLGIFNVRNKPDKQIIKGHEKEEKGDYKKMIYNLLPGPSKMLPKVFITSRSGQETYKPSKHILDGYNEKRHIKSSPKFDLGYCWDLIDYYKECIHKHPDWKNYDFHFSDTKDYEDISGFYREVEMQGYQIKWTYISADEIQKLDEKGQIFLFQIYNKDFSVHSTGKDNLHTMYLKNLFSEENLKDIVLKLNGEAELFFRKASIKTPVVHKKGSVLVNRSYTQTVGDKEIRVSIPEEYYTEIYNYLNHIGRGKLSTEAQRYLEERKIKSFTATKDIVKNYRYCCDHYFLHLPITINFKAKSDIAVNERTLAYIAKKEDIHIIGIDRGERNLLYISVVDVHGNIREQRSFNIVNGYDYQQKLKDREKSRDAARKNWEEIEKIKELKEGYLSMVIHYIAQLVVKYNAVVAMEDLNYGFKTGRFKVERQVYQKFETMLIEKLHYLVFKDREVCEEGGVLRGYQLTYIPESLKKVGKQCGFIFYVPAGYTSKIDPTTGFVNLFSFKNLTNRESRQDFVGKFDEIRYDRDKKMFEFSFDYNNYIKKGTMLASTKWKVYTNGTRLKRIVVNGKYTSQSMEVELTDAMEKMLQRAGIEYHDGKDLKGQIVEKGIEAEIIDIFRLTVQMRNSRSESEDREYDRLISPVLNDKGEFFDTATADKTLPQDADANGAYCIALKGLYEVKQIKENWKENEQFPRNKLVQDNKTWFDFMQKKRYL

SEQ ID NO: 160 - protein, 1280 aa, unidentified
  REGION 1..1280: note = Sequence from GenBank assembly GCA_003480125.1
MEEKELGKNQNFQEFIGVSPLQKTLRNELIPTETTKKNIAQLDLLTEDEVRAQNREKLKEMMDDYYRDVIDSTLRGELLIDWSYLFSCMRNHLSENSKESKRELERTQDSVRSQIHDKFAERADFKDMFGASIITKLLPTYIKQNSKYSERYDESVKIMKLYGKFTTSLTDYFETRKNIFSKEKISSAVGYRIVEENAEIFLQNQNAYDRICKIAGLDLHGLDNEITAYVDGKTLKEVCSDEGFAKVITQGGIDRYNEAIGAVNQYMNLLCQKNKALKPGQFKMKRLHKQILCKGTTSFDIPKKFENDKQVYDAVNSFTEIVTKNNDLKRLLNITQNANDYDMNKIYVVADAYSMISQFISKKWNLIEECLLDYYSDNLPGKGNAKENKVKKAVKEETYRSVSQLNEVIEKYYVEKTGQSVWKVESYISSLAEMIKLELCHEIDNDEKHNLIEDDEKISEIKELLDMYMDVFHIIKVFRVNEVLNFDETFYSEMDEIYQDMQEIVPLYNHVRNYVTQKPYKQEKYRLYFHTPTLANGWSKSKEYDNNAIILVREDKYYLGILNAKKKPSKEIMAGKEDCSEHAYAKMNYYLLPGANKMLPKVFLSKKGIQDYHPSSYIVEGYNEKKHIKGSKNFDIRFCRDLIDYFKECIKKHPDWNKFNFEFSATETYEDISVFYREVEKQGYRVEWTYINSEDIQKLEEDGQLFLFQIYNKDFAVGSTGKPNLHTLYLKNLFSEENLRDIVLKLNGEAEIFFRKSSVQKPVIHKCGSILVNRTYEITESGTTRVQSIPESEYMELYRYFNSEKQIELSDEAKKYLDKVQCNKAKTDIVKDYRYTMDKFFIHLPITINFKVDKGNNVNAIAQQYIAEQEDLHVIGIDRGERNLIYVSVIDMYGRILEQKSFNLVEQVSSQGTKRYYDYKEKLQNREEERDKARKSWKTIGKIKELKEGYLSSVIHEIAQMVVKYNAIIAMEDLNYGFKRGRFKVERQVYQKFETMLISKLNYLADKSQAVDEPGGILRGYQMTYVPDNIKNVGRQCGIIFYVPAAYTSKIDPTTGFINAFKRDVVSTNDAKENFLMKFDSIQYDIEKGLFKFSFDYKNFATHKLTLAKTKWDVYTNGTRIQNMKVEGHWLSMEVELTTKMKELLDDSHIPYEEGQNILDDLREMKDITTIVNGILEIFWLTVQLRNSRIDNPDYDRIISPVLNNDGEFFDSDEYNSYIDAQKAPLPIDADANGAFCIALKGMYTANQIKENWVEGEKLPADCLKIEHASWLAFMQGERG

SEQ ID NO: 161 - protein, 1305 aa, unidentified
  REGION 1..1305: note = Sequence from GenBank assembly GCA_003483025.1
MNKAADNYTGGNYDEFIALSKVQKTLRNELKPTSFTAEHIKQRGIISEDEYRAQQSLELKKIADEYYRNYITHKLNDINNLDFYNLFDAIEEKYKKNDKENRDKLDLVEKSKRGEIAKMLSADDNFKSMFEAKLITKLLPDYVERNYEGEDKEKALETLTLFKGFTTYFKGYFDIRKNMFNGEGGASSICHRIINVNASIFFDNLKTFMRIQEKAGDEIALIEEELTEKLDGWRLEHIFSRDYYNEVLAQKGIDYYNQICGDINKHMNLYCQQNKFKANIFKMMKIQKQIMGISEKVFEIPPMYQNDEEVYASFNEFISRLEEVKLTDRLRNILQNINIYNTAKIYINARYYTNVSSYVYGGWGVIDSAIERYLYNTIAGKGQSKVKKIENAKKDNKFMSVKELDSIVAEYEPDYFNAPYIDDDDNAVKAFGGQGVLGYFNKMSELLADVSLYTIDYNSDDSLIENKESALRIKKQLDDIMSLYHWLQTFIIDEVVEKDNAFYAELEDICCELENVVTLYDRIRNYVTKKPYSTQKFKLNFASPTLAAGWSRSKEFDNNAIILLRNNKYYIAIFNVNNKPDKQIIKGSEEQRLSTDYKKMVYNLLPGPNKMLPKVFIKSDTGKRDYNPSSYILEGYEKNRHIKSSGNFDINYCHDLIDYYKACINKHPEWKNYGFKFKETNQYNDIGQFYKDVEKQGYSISWAYISEEDINKLDEEGKIYLFEIYNKDLSAHSTGRDNLHTMYLKNIFSEDNLKNICIELNGEAELFYRKSSMKSNITHKKDTILVNKTYINETGVRVSLSDEDYMKVYNYYNNNYVIDTENDKNLIDIIEKIGHRKSKIDIVKDKRYTEDKYFLYLPITINYGIEDENVNSKIIEYIAKQDNMNVIGIDRGERNLIYISVIDNKGNIIEQKSFNLVNNYDYKNKLKNMEKTRDNARKNWQEIGKIKDVKSGYLSGVISEIARMVIDYNAIIVMEDLNKGFKRGRFKVERQVYQKFENMLISKLNYLVFKERKADENGGILRGYQLTYIPKSIKNVGKQCGCIFYVPAAYTSKIDPSTGFINIFDFKKYSGSGINAKVKDKKEFLMSMNSIRYINEGSEEYEKIGHRELFAFSFDYNNFKTYNVSSPVNEWTAYTYGERIKKLYKDGRWLRSEVLNLTENLIKLMEQYNIEYKDGHDIREDISHMDETRNADFICSLFEELKYTVQLRNSKSEAEDENYDRLVSPILNSSNGFYDSSDYMENENNTTHTMPKDADANGAYCIALKGLYEINKIKQNWSDDKKFKENELYINVTEWLDYIQNRRFE

SEQ ID NO: 162 - protein, 866 aa, unidentified
  REGION 1..866: note = Sequence from GenBank assembly GCA_003485785.1
MKDEEEGEFCSTVLAYSQAVLNITKRAEIFWLNEKQDAKVGEDNKDMIFYKKFDEFADDGFAPFFYFDKFGNYLKRRSRNTTKEIKLHFGNDDLLEGWDMNKEPEYWSFILRDRNQYYLGIGKKDGEIFHKKLGNSVEAVKEAYELENEADFYEKIDYKQLNIDRFEGIAFPKKTKTEEAFRQVCKKRADEFLGGDTYEFKILLAIKKEYDDFKARRQKEKDWDSKFSKEKMSKLIEYYITCLGKRDDWKRFNLNFRQPKEYEDRSDFVRHIQRQAYWIDPRKVSKDYVDKKVAEGEMFLFKVHNKDFYDFERKSEDKKNHTANLFTQYLLELFSCENIKNIKSKDLIESIFELDGKAEIRFRPKTDDVKLKIYQKKGKDVTYADKRDGNKEKEVIQHRRFAKDALTLHLKIRLNFGKHVNLFDFNKLVNTELFAKVPVKILGMDRGENNLIYYCFLDEHGEIENGKCGSLNRVGEQIITLEDDKKVKEPVDYFQLLVDREGQRDWEQKNWQKMTRIKDLKKAYLGNVVSWISKEMLSGIKEGVVTIGVLEDLNSNFKRTRFFRERQVYQGFEKALVNKLGYLVDKKYDNYRNVYQFAPIVDSVEEMEKNKQIGTLVYVPASYTSKICPHPKCGWRERLYMKNSASKEKIVGLLKSDGIKISYDQKNDRFYFEYQWEQEHKSDGKKKKYSGVDKVFSNVSRMRWDVEQKKSIDFVDGTDGSITNKLKSLLKGKGIELDNINQQIVNQQKELGVEFFQSIIFYFNLIMQIRNYDKEKSGSEADYIQCPSCLFDSRKPEMNGKLSAITNGDANGAYNIARKGFMQLCRIRENPQEPMKLITNREWDEAVREWDIYSAAQKIPVLSEEN

SEQ ID NO: 163 - protein, 1295 aa, unidentified
  REGION 1..1295: note = Sequence from GenBank assembly GCA_003486385.1
MKGAKMGYENFINKNSCVKTLVNELRPTEWTRKHIEEDGILSADELRAEESDKLKSIMDDYYRRYIYTKLSGVNSLYWSEFFSIIEMAYKEGKKDKNCKAQLEKAQEEMRGKFYNVLSDDDIFKMMFSGKFVTKVLPEFVLNNKEYSDEEKQQKLDTLKLFKGFTTSLVPFFNNRENIFSKKPIHSSICHRTVDENTAIFYQNIISYKNIEDNAPQEIEKIEHHGRQQLDEWKLPDIYSYSFYNNVLTQQGIEFYNDICGIVNSHMNLYCQQTKEKSGQYRMRKLYKQILSISSTSYEVPYKYEDDAQVYSSINEFVDRIFNSNFSAKVEKMLGKAEEYDFDKIYIASKNYSSISNFISGKWNTLDDCIRRYYEDNTVGNGDKKEKKVEEKVKKDSFRSLDSIDKVVEMYGKGGKSAKEYIYQIREIYSDNKLYKFGQDGSDSVKLIENDAKIEHIKCVLDMLLNTNRFLDTFTVEDGEAIDVGFYSEIDDLKEIIDGIDPLYNRVRNYVTRKPYNKNKIKLNFNSPTLAEGWSKSKEYEDNAIILRRDGKYYLGIFNVKNKPDKKIMEGYSGYVGDGYEKMVYSLLPGAGKMLPKVFLSKKGIGNYKPSSYIIDGYDNDRHIKSSKNFDINFCHDLIDYFKASISANPDWKVFDFKFSDTKSYEDISGFYSEVEKQGYKISWVNISKEDIDRLDETGQIYLFQIYNKDFSESSMGTPNLHTLYFKNLFSEENIRETVLKLSGKGELFFRKASIDKPSGHRKGSILVNKTYKTNIGNEEVRVPVPDKEYMEIYTYLNNGRTTKLSENAQSLLDNKLVEYFEAEKEIIKDRRYTVDKFFIHTSVVINYNAEGASDKQLNEQVLEYISKQDDMHIIGIDRGERNLVYVSVIDMKGRIVEQKSYNVVNSYSYQKKLVERERTRDEARKSWKEVGRIKDLKDGYLSLVVHEIADMVIKYNAIIAMEDLNYGFKRGRFKIERQVYQKFESMLISKLSYLVDKTKKADEPGGVLKGYQLAFVPKDVKKVGRQCGIIFYVPPAYTSKIDPATGFVDLFKFKSGEKEGTARADNDRKEFLSKFDDIRYVEKNDNREEMFAFTFDYDNFAMHNTVIAKKKWTAYTFGSRIQKVYENGRYTSNTREIELSDKMKRLLNENNIEYGDGHNLVDDIRTLDVDSSGAVINEIFKIFRLTVQLRNSKSEAENEKNGEYDRIISPIMNDAGEFFDSFKYKKMNEETEPGKHNATMPIDADANGAYCIAMKCLYEAKNIKSGWEKEGKKNNDLLCVTNADWFDFMQNKRYV

SEQ ID NO: 164 - protein, 1245 aa, unidentified
  REGION 1..1245: note = Sequence from GenBank assembly GCA_003486865.1
MQEHKKISHLTHRNSVQKTIRMQLNPVGKTMDYFQAKQILENDEKLKENYQKIKEIADRFYRNLNEDVLSKTMLDKLKDYAEIYYHCNTDADRKRLDECASELRKEIVKNFKNRDEYNKLFNKKMIEIVLPEHLKNEDEKEVVASFKNFTTYFTGFFTNRKNMYSDGEESTAIAYRCINENLPKHLDNVKAFEKAISKLSKNAIDDLDATYSGLCGINLYDVFTVDYFNFLLPQSGITEYNKIIGGYTTSDGTKVKGINEYINLYNQQVSKRDKIPNLKILYKQILSESEKVSFIPPKFEDDNELLSAVSEFYANDETFDGMPLKKAIDETKLLFGNLDNSSLNGIYIQNDRSVTNLSNSMFGSWSVIEDLWNKNYDSVNSNSRIKDIQKREDKRKKAYKAEKKLSLSFLQVLISNSENDEIREKSIVDYYKTSLMQLTDNLSDKYKEAAPLFSENYDNEKGLKNDDKSISLIKNFLDAIKEIEKFIKPLSETNITGEKNDLFYSQFTPLLDNISRIDILYDKVRNYVTQKPFSTDKIKLNFGNSQLLNGWDRNKEKDCGAVWLCKDEKYYLAIIDKSNNSILENIDFQDCDKSDCYEKIIYKLLPGPNKMLPKVFFSEKCKKLLSPSDEILKIRKNGTFKKGDKFSLDDCHKLIDFYKESFKKYPNWLIYNFKFKNTNEYNDISEFYNDVASQGYNISKMKIPTSFIDKLVDEGKIYLFQLYNKDFSPHSKGTPNLHTLYFKMLFDERNLEDVVYKLNGEAEMFYRPASIKYDKPTHPKNTPIKNKNTLNDKKASTFPYDLIKDKRYTKWQFSLHFPITMNFKAPDKAMINDDVRNLLKSCNNNFIIGIDRGERNLLYVSVIDSNGAIIYQHSLNIIGNKFKGKTYETNYREKLATREKDRTEQRRNWKAIESIKELKEGYISQAVHVICQLVVKYDAIIVMEKLTDGFKRGRTKFEKQVYQKFEKMLIDKLNYYVDKKLDPDEEGGLLHAYQLTNKLESFDKLGTQSGFIFYVRPDFTSKIDPVTGFVNLLYPRYENIDKAKDMISRFDDIRYNAGEDFFEFDIDYDKFPKTASDYRKKWTICTNGERIEAFRNPASNNEWSYRTIILAEKFKELFDNNSINYRDSDDLKAEILSQTKGKFFEDFFKLLRLTLQMRNSNPETGEDRILSPVKDKNGNFYDSSKYDEKSKLPCDADANGAYNIARKGLWIVEQFKKADNVSTVEPVIHNDKWLKFVQENYMANN

SEQ ID NO: 165 - protein, 1287 aa, unidentified
  REGION 1..1287: note = Sequence from GenBank assembly GCA_003487145.1
MNNNTNNSLAPFIGGNSVSKTLRNELRVGSEYTRKHIIEYGIIAEDAVKAENQYTVKEMMDDFYRDFIDRKLDALQGINWEQLFDIMKKVKLDKNDKTSKELDKIQESIRKEIGKIFSSDPIYKDMLKADMISKILPEYIVDKYDDAASRIEAVKVFYGFAGYFIDFWASRKNIFSDTNIASAIPYRIVNENARIHMENITAFNRIAEIAGDEVAEIAEDASAYLQNMSLEDVFTGACYGEFICQKDIDRYNNICGVINQHMNQFCQNKKISRSKFKMERLHKQILCRSESGFEIPVGFQTDGEVIDAINSFSTILEEKDILNRLRTLSQEVTGYDMERIYVSSKAFESVSKYIDHKWDVIASSMYNYFSGAVRGKDDKKDAKIQTEIKKIKSCSLLDLKKLVDMYYKMDGMCLEHEATEYVAGITEILVDFNYKTFDMDDSVKMIQNEQMINEIKEYLDTYMSIYHWAKDFMIDEFVDRDMEFYSELDEIYYDLSDIVPLYNKVRNYVTQKPYSQDKIKLNFGSPTLANGWSKSKEFDNNVVVLLRDEKIYLAILNVGNKPSKDIMAGEDRRRSDTDYKKMNYYLLPGASKTLPHVFISSNAWKKSHGIPDEIMYGYNQNKHLKSSPNFDLEFCHKLIDYYKECIDSYPNYQIFNFKFAATETYNDISAFYKDVERQGYKIEWSYISEDDINQMDRDGQIYLFQIYNKDFAPNSKGMQNLHTMFLKNIFSEENLSDVVIKLNGEAELFFRKSSIQHKRGHKKGSVLVNKTYKTTEKTENGQGEIEVIESLPDQCYMELVKYWSEGGVGQLSEEASKYKDKVSHYAATMDIVKDRRYTEDKFFIHLPITINFKADNRNNVNEKVLKFIAENDDLHVIGIDRGERNLLYVSVIDSRGRIVEQKSFNIVENHESSKNVIRRHDYKGKLVNKEKYRNEARKSWKEIGKIKEIKEGYLSQVIHEISKLVLKYNAIIVMEDLNYGFKRGRFKVERQVYQKFETMLINKLAYLVDKSRAVDEPGGLLKGYQLTYVPDNLSELGSQCGIIFYVPAAYTSKIDPVTGFVDVFDFKAYSNAEARLDFINKLDCIRYDASRNKFEIAFDYGNFRTHHTTLAKTSWTIFIQGDRIKKERGSYGWKDEIIDIEARIRKLFEDTNIEYADGHNLIGDINELESPIQKKFVGELFDIIRFAVQLRNSKSEKYDGTEKEYDKIISPVMDEEGVFFTTDSYIRADGTELPKDADANGAYCIALKGLYDVLTVKKYWKEGEKFDRKLLAITNYKWFDFIQNRRF

SEQ ID NO: 166 - protein, 1296 aa, unidentified; identical to SEQ ID NO: 157
  REGION 1..1296: note = Sequence from GenBank assembly GCA_003487405.1

SEQ ID NO: 167 - protein, 882 aa, unidentified
  REGION 1..882: note = Sequence from GenBank assembly GCA_003487615.1
MLFRDNWNSEYDSKKKRSKIKDIEKYEENRNKTYKKIDSFSIDEIAGLLNKNVEDLIKYYQCNINELFKSITESYTIFKSVFDSKEVDEDDYEFSEKEIEEIKTYLDGVKKLESLLKQFMLNGKENNIDYVFYGDFIPAFDRICEIDSIYNKVRNYITSTRKPYKSDKYRLYFDNPQMLEGWDINKENARKTSMLLKDGQYYFAIINDKKSPFDNIPDEYVEDRDYYKKMIYKQIPNAAKYISGKNIKNPPLEILEILKKRKKDSKSLTEDEKNRFIDYVKTDFLVNYEPIIDKNGNRYFDFKFKNAEEYPTLEDFFEDVNRQAYSIRFEKISTRYINELVENGQIYLFRIYSKDFSEYSKGNKNLHTMYFEALFDEDNLENQIMKLNGGAEFFIRQASISKDKLIVHNKGQKLDNKNPLNSKKQSVFNYDLIKDKRFTEDQYMLHVSIDINKNAMKAENVQTINERVRKELKECDDNYIIGIDRGERNLIYICVINGNGEIVEQMSLNNIINEYNSVQHTTDYHKLLSKCEAERDKQRKSWKSIENIKELKDGYLSQVVHKICQLVEKYDAIIAMEDLNRGFVRNRLKFEKQVYQKFEKKLIDKLNYMVDKNKQEMENGGILKGYQLTNSFNKDSSFQNGFVFYVPAWLTSKIDPTTGFVDFLKPKYVSVNESCEWISRFDSIKYDKSIDMFGFDIDYSNFTRADIDYRKKWTFYSNGDRIEEFRNSNTNNKNDYKVIKLSEEIKKLLESYNISYIGGDDIIPAIKCISDKGFWVNFIRYIKLTLQMRNNITGKTDVDYIISPVMNNMGNFYDSRQYDNEDSSLLPQNADANGAYNIARKALWAIDRIKEAEDDELKNVKIAISNKEWIEYAQTHFIKKEC

SEQ ID NO: 168 - protein, 1250 aa, unidentified
  REGION 1..1250: note = Sequence from GenBank assembly GCA_003499665.1
NHMKQFTNQFSLSKTLRFELIPQGKTKEFIEINGLIEKDNERAVSYKKVKKIIDEYHKYFIEMVLCDFKLHGLETYETIFNKKEKDDTDKKEFDNIRNSLRKQIADAFAKNPNDEIKERFKNLFAKELIKQDLLNFVDDEQKELVNEFKDFTTYFTGFHQNRRNMYVADEKATAIAYRLVNENLPKFIDNLKIYEKIKKDAPELISDLNKTLVEMEEIVQGKTLDEIFSLSFFNQTLTQTGIELYNIVIGGRTADEGKTKIKGLNEYINTDYNQKQTDKKKKQAKFKQLYKQILSDRHSVSFVAETFETDAQLLENIEQFYSSVLCNYEDDGHTTNIFEAIKNLIIGLKTFDLSKIYLRNDTSLTDISQKLFGDWSIISSALNDYYEKQNPISSKEKQEKYDERKAKWLKQDFNIETIQTALNECDSEIIKEKNNKNIVSEYFAKLGLDKDNKIDLLQKIHHNYVVIKDLLNEPYPENIKLGNQKEQVSQIKDFLDSILNLIHFLKPLSLKDKDKEKDELFYSLFTALFEHLSQTISIYNKVRNYLTQKAYSTEKIKLNFENSTLLNGWDVNKEPVNTSVIFRKNGLFYLGIMSKSNNRIFERNVPVCKNEETAFEKMNYKLLPGANKMLPKVFLSAKGIESFQPSAEIQSKYQKETHKKGDAFVRKDMENLIDFFKQSIAKHTDWKHFNHQFSKTETYNDLSEFYKEVEKQGYKLTFTKLDETYINQLVDEGKLYLFQIYNKDFSPFSKGKPNMHTLYWKMLFDEQNLQNVVYKLNGEAEVFFRQSSIKQTDRIIHKANQAIDNKNPLNNKKQSSFNYDLIKDKRFTLDKFQFHVPITLNFKAEGNEYLNTKVNEYLKSNSDVKIIGLDRGERHLIYLTLINQKGELLKQQSLNVIATSQEHETDYKNLLVNKENERANARQDWKTIETIKELKEGYLSQVVHQIATMMVDENAIVVMEDLNAGFMRGRQKVERQVYQKLEKMLIEKLNYLVFKNNDVNETAGVLNALQLTNKFESFEKMGKQSGFLFYVPAWNTSKIDPATGFVDFLKPKYESVEKAKLFFEKFESIKFNADKNYFEFEFDYKKFTEKAEGSQTKWTVCTHSDVRYRYNPQTKASDEVNVTNELKLIFDKFKIEYKNGKNLKTELLLQDDKQLFSKLLHYLALTLMLRQSKSGTDIDFILSPVAKNGVFYDSRNAMPNLPKDADANGAFHIALKGLWCVQQIKKADDLKKIKLAISNKEWLSFVQNLK

SEQ ID NO: 169 - protein, 1287 aa, unidentified
  REGION 1..1287: note = Sequence from GenBank assembly GCA_003479365.1
MGNNMDNSFEPFIGGNSVSKTLRNELRVGSEYTGKHIKECAIIAEDAVKAENQYIVKEMMDDFYRDFINRKLDALQGINWEQLFDIMKKAKLDKSNKVSKELDKIQESTRKEIGKIFSSDPIYKDMLKADMISKILPEYIVDKYGDAASRIEAVKVFYGFSGYFIDFWASRKNVFSDKNIASAIPHRIVNVNARIHLDNITAFNRIAEIAGDEVAGIAEDACAYLQNMSLEDVFTGACYGEFICQKDIDRYNNICGVINQHMNQYCQNKKISRSKFKMERLHKQILCRSESGFEIPIGFQTDGEVIDAINSFSTILEEKDILDRLRTLSQEVTGYDMERIYVSSKAFESVSKYIDHKWDVIASSMYNYFSGAVRGKDDKKDVKIQTEIKKIKSCSLLDLKKLVDMYYKMDGMCLEHEATEYVAGITEILVDFNYKTFDMDDSVKMIQNEHMINEIKEYLDTYMSIYHWAKDFMIDELVDRDMEFYSELDEIYYDLSDIVPLYNKVRNYVTQKPYSQDKIKLNFGSPTLANGWSKSKEFDNNVVVLLRDEKIYLAILNVGNKPSKDIMAGEDRRRSDTDYKKMNYYLLPGASKTLPHVFISSNAWKKSHGIPDEIMYGYNQNKHLKSSPNFDLEFCRKLIDYYKECIDSYPNYQIFNFKFAATETYNDISEFYKDVERQGYKIEWSYISEDDINQMDRDGQIYLFQIYNKDFAPNSKGMQNLHTLYLKNIFSEENLSDVVIKLNGEAELFFRKSSIQHKRGHKKGSVLVNKTYKTTEKTENGQGEIEVIESVPDQCYLELVKYWSEGGVGQLSEEASKYKDKVSHYAATMDIVKDRRYTEDKFFIHMPITINFKADNRNNVNEKVLKFIAENDDLHVIGIDRGERNLLYVSVIDSRGRIVEQKSFNIVENYESSKNVIRRHDYRGKLVNKEHYRNEARKSWKEIGKIKEIKEGYLSQVIHEISKLVLKYNAIIVMEDLNYGFKRGRFKVERQVYQKFETMLINKLAYLVDKSRAVDEPGGLLKGYQLTYVPDNLGELGSQCGIIFYVPAAYTSKIDPVTGFVDVFDFKAYSNAEARLDFINKLDCIRYDAPRNKFEIAFDYGNFRTHHTTLAKTSWTIFIHGDRIKKERGSYGWKDEIIDIEARIRKLFEDTDIEYADGHNLIGDINELESPIQKKFVGELFDIIRFTVQLRNSKSEKYDGTEKEYDKIISPVMDEEGVFFTTDSYIRADGTELPKDADANGAYCIALKGLYDVLAVKKYWKEGEKFDRKLLAITNYNWFDFIQNRRF

SEQ ID NO: 170 - protein, 719 aa, unidentified
  source 1..719: note = Candidatus Falkowbacteria
KMEYKYLPNTSRMIPKVTTQRKDVISHFKHSDDDYLLSNQKSFNKPLKISKEIFELNNRIYSRSDLSESVIRDKGNGNDEKKYVKLFQKDYYAKCGGGHDVYQQALWKWIDFCKEFLSCYMSCEYFDFSSLIQTADYDSVEIFYADVDKACYVKKFVQINAQQLNRLVSEGKAYLFKIYNKDFSERKIKITDGKDNLETIMLKSLFSKDNIESKVIQLNGGAELFFRKASVDRVNDEKRSKNIDIVTHKRYTEDKYFFHFPITINFGEKVSGQQFRDNVFKKIKQDDLNIIGIDRGEKHLLYYSVVSPRGELLERGSLNQIESGGEVQEKEISEQFDDHGALKSVELVETGNEVKYVDYHVLLDYYEKKRNLARRDWQTIGKIKDLKSGYLSQVIHKICQLILKYDAIVVMEDLNVEFKAKRAAKVEKSVYKNFELALARKLNHLILKDKSINDIGGTLKAYQLTPVIPANDVGKFDKASQWGIMFYVRANYTSITDPLTGWRQHKYISNSDNIGKIQEFFNPDSGVQINYDTEKQCYRFSYGQQFDDNTIKQWDLFAYEGLERFYWDNKNRSVKKYSLYTEFEHIFSDLDKSKNINHQIEGMTGFGWKSLVFFWNLLNQIRNTDRLKQGDENDFLQSPAWSDRQECFYDSRKALAGLPTNGDANGAFNISRKGLILLDRIKRCPDLSRFGNNNNGRNPENGYFISDVEWDKFVQSANE

SEQ ID NO: 171 - protein, 1263 aa, unidentified
  REGION 1..1263: note = Sequence from GenBank assembly GCA_003526365.1
MNNGTNNFQNFIGISSLQKTLRNALIPTETTQQFIVKNGIIKEDELRGENRQILKDIMDDYYRGFISETLSSIDDIDWTSLFEKMEIQLKNGDNKDTLIKEQAEKRKAIYKKFADDDRFKNMFSAKLISDILPEFVIHNNNYSASEKEEKTQVIKLFSRFATSFKDYFKNRANCFSADDISSSSCHRIVNDNAEIFFSNALVYRRIVKNLSNDDINKISEDMKESLKEMSLEEIYSYEKYGEFITQEGISFYNDICGKVNSFMNLYCQKNKENKNLYKLRKLHKQILCIADTSYEVPYKFESDEEVYQSVNGFLDNISSKHIVERLRKIGDNYNGYNLDKIYIVSKFYESVSQKTYRDWETINTALEIHYNNILPGNGKSKADKVKKAVKNDLQKSITEINELVSNYKLCPDDNIKAETYIHEISHILNNFEAQELKYNPEIHLVESELKASELKNVLDVIMNAFHWCSVFMTEELVDKDNNFYAELEEIYDEIYPVISLYNLVRNYVTQKPYSTKKIKLNFGIPTLADGWSKSKEYSNNAIILMRDNLYYLGIFNAKNKPDKKIIEGNTSENKGDYKKMIYNLLPGANKMIPWVFLSSKKGVETYKPSAYILEGYKQNKHLKSSKDFDITFCHDLIDYFKNCIAIHPEWKNFGFEFSDTSTYEDISGFYREVELQGYKIDWTYISEKDIELLQEKGQLYLFQIYNKDFSKKSTGNDNLHTMYLKNLFSEENLKDIVLKLNGKAEIFFRKSSIKNPIIHKKGSILVNRTYEAEEKDQFGNIRIVRKNIPENIYQELYKYYNDKSDKELSDEAAKLKDIVGHHEAATNIVKDYRYTYDKYFLHMPITINFKANKTSFINDRILQYIAKEKDLHVIGIDRGERNLIYVSVIDTCGNIVEQKSFNIVNGYDYQIKLKQQEGARQIARKEWKEIGKIKEIKEGYLSLVIHEISKMVIKYNAIIAMEDLSYGFKKGRFKVERQVYQKFETMLINKLNYLVFKDISITENGGLLKGYQLTYIPEKLKNVGHQCGCIFYVPAAYTSKIDPTTGFVNIFKFKDLTVDAKREFIKKIDSIRYDSEKNLFCFTFDYNNFITQNTVMSKSSWSVYTYGVRIKRRFVNGRFSNESDTIDITKDMEKTLEMTDINWRDGHDLRQDIIDYEIVQHIFEIFKLTVQMRNSLSELEDRDYDRLISPVLNENNIFYDSAKAGDALPKDADANGAYCIALKGLYEIKQITENWKEDGKFSRDKLKISNKDWFDFIQNKRYL

SEQ ID NO: 172 - protein, 1275 aa, unidentified
  REGION 1..1275: note = Sequence from GenBank assembly GCA_003531185.1
MGKNQNFQEFIGVSPLQKTLRNELIPTETTKKNITQLDLLTEDEIRAQNREKLKEMMDDYYRDVIDSTLHAGIAVDWSYLFSCMRNHLRENSKESKRELERTQDSIRSQIYNKFAERADFKDMFGASIITKLLPTYIKQNPEYSERYDESMEILKLYGKFTTSLTDYFETRKNIFSKEKISSAVGYRIVEENAEIFLQNQNAYDRICKIAGLDLHGLDNEITAYVDGKTLKEVCSDEGFAKAITQEGIDRYNEAIGAVNQYMNLLCQKNKALKPGQFKMKRLHKQILCKGTTSFDIPKKFENDKQVYDAVNSFTEIVMKNNDLKRLLNITQNVNDYDMNKIYVAADAYSTISQFISKKWNLIEECLLDYYSDNLPGKGNAKENKVKKAVKEETYRSVSQLNELIEKYYVEKTGQSVWKVESYISRLAETITLELCHEIENDEKHNLIEDDDKISKIKELLDMYMDAFHIIKVFRVNEVLNFDETFYSEMDEIYQDMQEIVPLYNHVRNYVTQKPYKQEKYRLYFNTPTLANGWSKNKEYDNNAIILMRDDKYYLGILNAKKKPSKQTMAGKEDCLEHAYAKMNYYLLPGANKMLPKVFLSKKGIQDYHPSSYIVEGYNEKKHIKGSKNFDIRFCRDLIDYFKECIKKHPDWNKFNFEFSATETYEDISVFYREVEKQGYRVEWTYINSEDIQKLEEDGQLFLFQIYNKDFAVGSTGKPNLHTLYLKNLFSEENLRDIVLKLNGEAEIFFRKSSVQKPVIHKCGSILVNRTYEITESGTTRVQSIPESEYMELYRYFNSEKQIELSDEAKKYLDKVQCNKAKTDIVKDYRYTMDKFFIHLPITINFKVDKGNNVNAIAQQYIAEQEDLHVIGIDRGERNLIYVSVIDMYGRILEQKSFNLVEQVSSQGTKRYYDYKEKLQNREEERDKARKSWKTIGKIKELKEGYLSSVIHEIAQMVVKYNAIIAMEDLNYGFKRGRFKVERQVYQKFETMLISKLNYLADKSQAVDEPGGILRGYQMTYVPDNIKNVGRQCGIIFYVPAAYTSKIDPTTGFINAFKRDVVSTNDAKENFLMKFDSIQYDIEKGLFKFSFDYKNFATHKLTLAKTKWDVYTNGTRIQNMKVEGHWLSMEVELTTKMKELLDDSHIPYEEGQNILDDLREMKDITTIVNGILEIFWLTVQLRNSRIDNPDYDRIISPVLNNDGEFFDSDEYNSYIDAQKAPLPIDADANGAFCIALKGMYTANQIKENWVEGEKLPADCLKIEHASWLAFMQGERG

SEQ ID NO: 173 - protein, 1305 aa, unidentified; identical to SEQ ID NO: 161
  REGION 1..1305: note = Sequence from GenBank assembly GCA_003531445.1

SEQ ID NO: 174 - protein, 1305 aa, unidentified; identical to SEQ ID NO: 161
  REGION 1..1305: note = Sequence from GenBank assembly GCA_003540585.1

SEQ ID NO: 175 - protein, 1259 aa, unidentified
  REGION 1..1259: note = Sequence from GenBank assembly GCA_003584705.1
MNYKTGLEDFIGKESLSKTLRNALIPTESTKIHMEEMGVIRDDELRAEKQQELKEIMDDYYRTFIEEKLGQIQGIQWNSLFQKMEETMEDISVRKDLDKIQNEKRKEICCYFTSDKRFKDLFNAKLITDILPNFIKDNKEYTEEEKAEKEQTRVLFQRFATAFTNYFNQRRNNFSEDNISTAISFRIVNENSEIHLQNMRAFQRIEQQYPEEVCGMEEEYKDMLQEWQMKHIYSVDFYDRELTQPGIEYYNGICGKINEHMNQFCQKNRINKNDFRMKKLHKQILCKKSSYYEIPFRFESDQEVYDALNEFIKTMKKKEIIRRCVHLGQECDDYDLGKIYISSNKYEQISNALYGSWDTIRKCIKEEYMDALPGKGEKKEEKAEAAAKKEEYRSIADIDKIISLYGSEMDRTISAKKCITEICDMAGQISIDPLVCNSDIKLLQNKEKTTEIKTILDSFLHVYQWGQTFIVSDIIEKDSYFYSELEDVLEDFEGITTLYNHVRSYVTQKPYSTVKFKLHFGSPTLANGWSQSKEYDNNAILLMRDQKFYLGIFNVRNKPDKQIIKGHEKEEKGDYKKMIYNLLPGPSKMLPKVFITSRSGQETYKPSKHILDGYNEKRHIKSSPKFDLGYCWDLIDYYKECIHKHPDWKNYDFHFSDTKDYEDISGFYREVEMQGYQIKWTYISADEIQKLDEKGQIFLFQIYNKDFSVHSTGKDNLHTMYLKNLFSEENLKDIVLKLNGEAELFFRKASIKTPIVHKKGSVLVNRSYTQTVGNKEIRVSIPEEYYTEIYNYLNHIGKGKLSSEAQRYLDEGKIKSFTATKDIVKNYRYCCDHYFLHLPITINFKAKSDVAVNERTLAYIAKKEDIHIIGIDRGERNLLYISVVDVHGNIREQRSFNIVNGYDYQQKLKDREKSRDAARKNWEEIEKIKELKEGYLSMVIHYIAQLVVKYNAVVAMEDLNYGFKTGRFKVERQVYQKFETMLIEKLHYLVFKDREVCEEGGVLRGYQLTYIPESLKKVGKQCGFIFYVPAGYTSKIDPTTGFVNLFSFKNLTNRESRQDFVGKFDEIRYDRDKKMFEFSFDYNNYIKKGTILASTKWKVYTNGTRLKRIVVNGKYTSQSMEVELTDAMEKMLQRAGIEYHDGKDLKGQIVEKGIEAEIIDIFRLTVQMRNSRSESEDREYDRLISPVLNDKGEFFDTATADKTLPQDADANGAYCIALKGLYEVKQIKENWKENEQFPRNKLVQDNKTWFDFMQKKRYL

SEQ ID NO: 176 - protein, 1288 aa, unidentified
  REGION 1..1288: note = Sequence from GenBank assembly GCA_003603115.1
MVGNKISNSFDSFTGINALSKTLRNELIPSDYTKRHIAESDFIAADTNKNEDQYVAKEMMDDYYRDFISKVLDNLHDIEWKNLFELMHKAKIDKSDATSKELIKIQDMLRKKIGKKFSQDPEYKVMLSAGMITKILPKYILEKYETDREDRLEAIKRFYGFTVYFKEFWASRQNVFSDKAIASSISYRIIHENAKIYMDNLDAYNRIKQIACEEIEKIEEEAYDFLQGDQLDVVYTEEAYGRFISQSGIDLYNNICGVINAHMNLYCQSKKCSRSKFKMQKLHKQILCKAETGFEIPLGFQDDAQVINAINSFNALIKEKNIISRLRTIGKSISLYDVNKIYISSKAFENVSVYIDHKWDVIASSLYKYFSEIVKGNKDNREEKIQKEIKKVKSCSLGDLQRLVNSYYKIDSTCLEHEVTEFVTKIIDEIDNFQITDFKFNDKISLIQNEQIVMDIKTYLDKYMSIYHWMKSFVIDELVDKDMEFYSELDELNEDMSEIVNLYNKVRNYVTQKPYSQEKIKLNFGSPTLADGWSKSKEFDNNAIILIRDEKIYLAIFNPRNKPAKTVISGHDVCNSETDYKKMNYYLLPGASKTLPHVFIKSRLWNESHGIPDEILRGYELGKHLKSSVNFDVEFCWKLIDYYKECISCYPNYKAYNFKFADTESYNDISEFYREVECQGYKIDWTYISSEDVEQLDRDGQIYLFQIYNKDFAPNSKGMDNLHTKYLKNIFSEDNLKNIVIKLNGEAELFYRKSSVKKKVEHKKGTILVNKTYKVEDNTENSKEKRVIIESVPDDCYMELVDYWRNGGIGILSDKAVQYKDKVSHYEATMDIVKDRRYTVDKFFIHLPITINFKADGRININEKVLKYIAENDELHVIGIDRGERNLLYVSVINKKGKIVEQKSFNMIESYETVTNIVRRYNYKDKLVNKESARTDARKNWKEIGKIKEIKEGYLSQVIHEISKMVLKYNAIIVMEDLNYGFKRGRFRVERQVYQKFENMLISKLAYLVDKSRKADEPGGVLRGYQLTYIPDSLEKLGSQCGIIFYVPAAYTSKIDPLTGFVNVFNFREYSNFETKLDFVRSLDSIRYDTEKKLFSISFDYDNFKTHNTTLAKTKWVIYLRGERIKKEHTSYGWKDDVWNVESRIKDLFDSSHMKYDDGHNLIEDILELESSVQKKLINELIEIIRLTVQLRNSKSERYDRTEAEYDRIVSPVMDENGRFYDSENYIFNEETELPKDADANGAYCIALKGLYNVIAIKNNWKEGEKFNRKLLSLNNYNWFDFIQNRRF

SEQ ID NO: 177 - protein, 824 aa, unidentified
  REGION 1..824: note = Sequence from GenBank assembly GCA_003603525.1
FAVDESNEVDPEFSARLTGIKLEMEPSLSFYNKARNYATKKPYSVEKFKLNFQMPTLASGWDVNKEKDNGAILFVKNGLYYLGIMPKQKGRYKALSFEPTEKTSEGFDKMYYDYFPDAAKMIPKCSTQLKAVTAHFQTHTTPILLSNNFIEPLEITKEIYDLNNPEKEPKKFQTAYAKKTGDQKGYREALCKWIDFTRDFLSKYTKTTSIDLSSLRPSSQYKDLGEYYAELNPLLYHISFQRIAEKEIMDAVETGKLYLFQIYNKDFAKGHHGKPNLHTLYWTGLFSPENLAKTSIKLNGQAELFYRPKSCMKRVAHRLGEKMLNKKLKDQKTPIPDTLYQELYDYVNHRLSHDLSDEARALLPNVITKEVSHEIIKDRRFTSDKFFFHVPITLNYQAANSPSKFNQRVNAYLKEHPETPIIGIDRGERNLIYITVIDSTGKILEQRSLNTIQQFDYQKKLDNREKERVAARQAWFVVGTIKDLKQGYLSQVIHEIVDLMIHYQAIVVLENLNFGFKSKRTGIAEKAVYQQFEKMLIDKLNCLVLKDYPAEKVGGVLNPYQLTDQFTSFAKMGTQSGFLFYVPAPYTSKIDPLTGFVDPFVWKTIKNHESRKHFLEGFDFLHYDVKTGDFILHFKMNRNLSFQRGLPGFMPAWDIVFEKNETQFDAKGTPFIAGKRIVPVIENHRFTGRYRDLYPANELIALLEEKGIVFRDGSNILPKLLENDDSHAIDTMVALIRSVLQMRNSNAATGEDYINSPVRDLNGVCFDSRFQNPEWPMDADANGAYHIALKGQLLLNHLKESKDLKLQNGISNQDWLAYIQELRN

SEQ ID NO: 178 - protein, 1261 aa, Porphyromonas crevioricanis
AMDSLKDFTNLYPVSKTLRFELKPVGKTLENIEKAGILKEDEHRAESYRRVKKIIDTYHKVFIDSSLENMAKMGIENEIKAMLQSFCELYKKDHRTEGEDKALDKIRAVLRGLIVGAFTGVCGRRENTVQNEKYESLFKEKLIKEILPDFVLSTEAESLPFSVEEATRSLKEFDSFTSYFAGFYENRKNIYSTKPQSTAIAYRLIHENLPKFIDNILVFQKIKEPIAKELEHIRADFSAGGYIKKDERLEDIFSLNYYIHVLSQAGIEKYNALIGKIVTEGDGEMKGLNEHINLYNQQRGREDRLPLFRPLYKQILSDREQLSYLPESFEKDEELLRALKEFYDHIAEDILGRTQQLMTSISEYDLSRIYVRNDSQLTDISKKMLGDWNAIYMARERAYDHEQAPKRITAKYERDRIKALKGEESISLANLNSCIAFLDNVRDCRVDTYLSTLGQKEGPHGLSNLVENVFASYHEAEQLLSFPYPEENNLIQDKDNVVLIKNLLDNISDLQRFLKPLWGMGDEPDKDERFYGEYNYIRGALDQVIPLYNKVRNYLTRKPYSTRKVKLNFGNSQLLSGWDRNKEKDNSCVILRKGQNFYLAIMNNRHKRSFENKVLPEYKEGEPYFEKMDYKFLPDPNKMLPKVFLSKKGIEIYKPSPKLLEQYGHGTHKKGDTFSMDDLHELIDFFKHSIEAHEDWKQFGFKFSDTATYENVSSFYREVEDQGYKLSFRKVSESYVYSLIDQGKLYLFQIYNKDFSPCSKGTPNLHTLYWRMLFDERNLADVIYKLDGKAEIFFREKSLKNDHPTHPAGKPIKKKSRQKKGEESLFEYDLVKDRRYTMDKFQFHVPITMNFKCSAGSKVNDMVNAHIREAKDMHVIGIDRGERNLLYICVIDSRGTILDQISLNTINDIDYHDLLESRDKDRQQERRNWQTIEGIKELKQGYLSQAVHRIAELMVAYKAVVALEDLNMGFKRGRQKVESSVYQQFEKQLIDKLNYLVDKKKRPEDIGGLLRAYQFTAPFKSFKEMGKQNGFLFYIPAWNTSNIDPTTGFVNLFHAQYENVDKAKSFFQKFDSISYNPKKDWFEFAFDYKNFTKKAEGSRSMWILCTHGSRIKNFRNSQKNGQWDSEEFALTEAFKSLFVRYEIDYTADLKTAIVDEKQKDFFVDLLKLFKLTVQMRNSWKEKDLDYLISPVAGADGRFFDTREGNKSLPKDADANGAYNIALKGLWALRQIRQTSEGGKLKLAISNKEWLQFVQERSYEKD

SEQ ID NO: 179 - protein, 1205 aa, Pseudobutyrivibrio xylanivorans
MYYQGLTKLYPISKTIRNELIPVGKTLEHIRMNNILEADIQRKSDYERVKKLMDDYHKQLINESLQDVHLSYVEEAADLYLNASKDKDIVDKFSKCQDKLRKEIVNLLKSHENFPKIGNKEIIKLLQSLSDTEKDYNALDSFSKFYTYFTSYNEVRKNLYSDEEKSSTAAYRLINENLPKFLDNIKAYSIAKSAGVRAKELTEEEQDCLFMTETFERTLTQDGIDNYNELIGKLNFAINLYNQQNNKLKGFRKVPKMKELYKQILSEREASFVDEFVDDEALLTNVESFSAHIKEFLESDSLSRFAEVLEESGGEMVYIKNDTSKTTFSNIVFGSWNVIDERLAEEYDSANSKKKKDEKYYDKRHKELKKNKSYSVEKIVSLSTETEDVIGKYIEKLQADIIAIKETREVFEKVVLKEHDKNKSLRKNTKAIEAIKSFLDTIKDFERDIKLISGSEHEMEKNLAVYAEQENILSSIRNVDSLYNMSRNYLTQKPFSTEKFKLNFNRATLLNGWDKNKETDNLGILLVKEGKYYLGIMNTKANKSFVNPPKPKTDNVYHKVNYKLLPGPNKMLPKVFFAKSNLEYYKPSEDLLAKYQAGTHKKGENFSLEDCHSLISFFKDSLEKHPDWSEFGFKFSDTKKYDDLSGFYREVEKQGYKITYTDIDVEYIDSLVEKDELYLFQIYNKDFSPYSKGNYNLHTLYLTMLFDERNLRNVVYKLNGEAEVFYRPASIGKDELIIHKSGEEIKNKNPKRAIDKPTSTFEYDIVKDRRYTKDKFMLHIPVTMNFGVDETRRFNEVVNDAIRGDDKVRVIGIDRGERNLLYVVVVDSDGTILEQISLNSIINNEYSIETDYHKLLDEKEGDRDRARKNWTTIENIKELKEGYLSQVVNVIAKLVLKYDAIICLEDLNFGFKRGRQKVEKQVYQKFEKMLIDKLNYLVIDKSRSQENPEEVGHVLNALQLTSKFTSFKELGKQTGIIYYVPAYLTSKIDPTTGFANLFYVKYESVEKSKDFFNRFDSICFNKVAGYFEFSFDYKNFTDRACGMRSKWKVCTNGERIIKYRNEEKNSSFDDKVIVLTEEFKKLFNEYGIAFNDCMDLTDAINAIDDASFFRKLTKLFQQTLQMRNSSADGSRDYIISPVENDNGEFFNSEKCDKSKPKDADANGAFNIARKGLWVLEQLYNSSSGEKLNLAMTNAEWLEYAQQHTI

SEQ ID NO: 180 - protein, 1278 aa, unidentified
  REGION 1..1278: note = Sequence from GenBank assembly GCA_005601135.1
MSININKFSDECRKIDFFTDLYNIQKTLRFSLIPIGATADNFEFKGRLSKEKDLLDSAKRIKEYISKYLADESDICLSQPVKLKHLDEYYELYITKDRDEQKFKSVEEKLRKELADLLKEILKRLNKKILSDYLPEYLEDDEKALEDIANLSSFSTYFNSYYDNCKNMYTDKEQSTAIPYRCINDNLPKFIDNMKAYEKALEELKPSDLEELRNNFKGVYDTTVDDMFTLDYFNCVLSQSGIDSYNAIIGNDKVKGINEYINLHNQTAEQGHKVPNLKRLYKQIGSQKKTISFLPSKFESDNELLKAVYDFYNTGDAEKNFTALKDTITEFEKIFDNLSEYNLDGVFVRNDISLTNLSQSMFNDWSVFRNLWNDQYDKVNNPEKAKDIDKYNDKRHKVYKKSESFSINQLQELIATTLEEDINSKKITDYFSCDFHRVTTEVENKYQLVKDLLSSDYPKNKNLKTSEEDVALIKDFLDSVKSLESFVKILTGTGKESGKDELFYGSFTKWFDQLRYIDKLYDKVRNYITEKPYSLDKIKLSFDNPQFLGGWQHSKETDYSAQLFMKDGLYYLGVMDKETKREFKTQYNTPENDSDTMVKIEYNQIPNPGRVIQNLMLVDGKIVKKNGRKNADGVNAVLEELKNQYLPENINRIRKTESYKTTSNNFNKDDLKAYLEYYIARTKEYYCKYNFVFKSADEYGSFNEFVDDVNNQAYQITKVKVSEKQLLSLVEQGKLYLFKIYNKDFSEYSKGKKNLHTMYFQMLFDDRNLENLVYKLQGGAEMFYRPASIKKDSEFKHDANVEIIKRTCEDKVNDKDNPTDDEKAKYYSKFDYDIVKNKRFTKDQFSLHLTLAMNCNQPDHYWLNNDVRELLKKSNKNHIIGIDRGERNLIYVTIINSDGVIVDQINFNIIENSYNGKKYKTDYQKKLNQREEDRQKARKTWKTIETIKELKDGYISQVVHQICKLIVQYDAIVVMENLNGGFKRGRTKVEKQVYQKFETMLINKLNYYVDKGTDYKECGGLLKAYQLTNKFETFERIGKQSGIIFYVDPYLTSKIDPVTGFANLLYPKYETIPKTHNFISNIDDIRYNQSEDYFEFDIDYDKFPQGSYNYRKKWTICSYGNRIKYYKDSRNKTASVVVDITEKFKETFTNAGIDFVNDNIKEKLLLVNSKELLKSFMDTLKLTVQLRNSEINSDVDYIISPIKDRNGNFYYSENYKKSNNEVPSQPQDGDANGAYNIARKGLMIINKLKKADDVTNNELLKISKKEWLEFAQKGDLGE

SEQ ID NO: 181 - protein, 526 aa, unidentified
  REGION 1..526: note = Sequence from GenBank assembly GCA_006088815.1
NKEEANTAILLKKDDLFYLGIMDKNHNKIFRNIPKIKSEKTFSKINYKLLPGASKMLPKVFFSAKSIGYYEPNKEIINIRNHSSHTKGGKPQDGFEKIDFNVQDCRKMIDFFKSSIEKHPEWKNFGFQFSDTQSYNTIDEFYKEIEAQGYNISYSDIPESYINQLVDEGKLYLFQIYNKDFSPYSKGTPNMHTLYWKALFTEENLSNVIYKLNGQAEIFYREKSIDDENIIVHKAKEAIGNKNPNAIKKQSTFEYDLVKDKRYTVDKFQFHVPISLNFKANGSNFINQEVLSFLKNNPDVNIIGIDRGERHLIYLSLINQKGEILSQESFNTIKDEHHEIETPYHQLLSIKEKERDEARKNWGTIENIKELKEGYLSQVVHKIAKMMVDHNTIILLEDLNFGFKRGRFKVEKQVYQKLEKMLIDKLNYLVFKDKKNPFEPGGLYNALQLTNKFTSFKDLGKQSGFLFYVPAWNTSKIDPTTGFVNLFNTKYESIEKAKKFFNNFQSILFNKKENHFEFTFNYNDFT

SEQ ID NO: 182 - protein, 1258 aa, unidentified
  REGION 1..1258: note = Sequence from GenBank assembly GCA_009676955.1
TMKYTDFTGIYPVSKTLRFELIPQGSTVENMKREGILNNDMHRADSYKEMKKLIDEYHKVFIERCLSDFSLKYDDTGKHDSLEEYFFYYEQKRNDKTKKIFEDIQVALRKQISKRFTGDTAFKRLFKKELIKEDLPSFVKNDPVKTELIKEFSDFTTYFQEFHKNRKNMYTSDAKSTAIAYRIINENLPKFIDNINAFHIVAKVPEMQEHFKTIADELRSHLQVGDDIDKMFNLQFFNKVLTQSQLAVYNAVIGGKSEGNKKIQGINEYVNLYNQQHKKARLPMLKLLYKQILSDRVAISWLQDEFDNDQDMLDTIEAFYNKLDSNETGVLGEGKLKQILMGLDGYNLDGVFLRNDLQLSEVSQRLCGGWNIIKDAMISDLKRSVQKKKKETGADFEERVSKLFSAQNSFSIAYINQCLGQAGIRCKIQDYFACLGAKEGENEAETTPDIFDQIAEAYHGAAPILNARPSSHNLAQDIEKVKAIKALLDALKRLQRFVKPLLGRGDEGDKDSFFYGDFMPIWEVLDQLTPLYNKVRNRMTRKPYSQEKIKLNFENSTLLNGWDLNKEHDNTSVILRREGLYYLGIMNKNYNKIFDANNVETIGDCYEKMIYKLLPGPNKMLPKVFFSKSRVQEFSPSKKILEIWESKSFKKGDNFNLDDCHALIDFYKDSIAKHPDWNKFNFKFSDTQSYTNISDFYRDVNQQGYSLSFTKVSVDYVNRMVDEGKLYLFQIYNKDFSPQSKGTPNMHTLYWRMLFDERNLHNVIYKLNGEAEVFYRKASLRCDRPTHPAHQPITCKNENDSKRVCVFDYDIIKNRRYTVDKFMFHVPITINYKCTGSDNINQQVCDYLRSAGDDTHIIGIDRGERNLLYLVIIDQHGTIKEQFSLNEIVNEYKGNTYCTNYHTLLEEKEAGNKKARQDWQTIESIKELKEGYLSQVIHKISMLMQRYHAIVVLEDLNGSFMRSRQKVEKQVYQKFEHMLINKLNYLVNKQYDAAEPGGLLHALQLTSRMDSFKKLGKQSGFLFYIPAWNTSKIDPVTGFVNLFDTRYCNEAKAKEFFEKFDDISYNDERDWFEFSFDYRHFTNKPTGTRTQWTLCTQGTRVRTFRNPEKSNHWDNEEFDLTQAFKDLFNKYGIDIASGLKARIVNGQLTKETSAVKDFYESLLKLLKLTLQMRNSVTGTDIDYLVSPVADKDGIFFDSRTCGSLLPANADANGAFNIARKGLMLLRQIQQSSIDAEKIQLAPIKNEDWLEFAQEKPYL

SEQ ID NO: 183 - protein, 558 aa, unidentified
  REGION 1..558: note = Sequence from GenBank assembly GCA_009775705.1
MPSKSFGFFPVKIEDVTHANGREVKPLFLFKISNKDLAYAEKHSKGLRKSRGTDNLHTMYFKVLLSMIQGTYDIGTGEVFYRKHTHELAENTARHKANQPIKNKNKANRTQESVFPYEIIKDRRYTCDKFQFHLSIITNYNSPKTADVNKLVHDAIRNGEIEHIIGIDRGERHLLYLSLIDLKGNIIKQFMLNEIINEYNGHTHSTNYKDLLVSREGDRNEARRNWQKIENIKEIKEGYLSQVVHIIAKMMVEYKAIVVLEDLNGGFMRGRQKIERQVYEKFEKMLIDKLNFYVDKQKDTDDIGGVLHPLQLTNKFESFRKLGKQSGWLFYIPAWNTSKMDPVTGFVNMHDTRYENADKARCFFLKFDVIRYNVEKNWFEFTFDYNNFHKKAEGTQTKWTLCTYGTRIKTFRNPKKNNQWDSEKVILTDEFKEVFADAGIDITGNLKEAICSLTEKKYLEPLMHLMKLLLQMRNSETRTEVDYILSPVADADGNFYDSRKNIATLPKDADANGAYNIARKGLWAIRKIQTTPIGEKLNLAISNKEWLQFAQQKPYLDE

SEQ ID NO: 184 - protein, 1259 aa, unidentified
  REGION 1..1259: note = Sequence from GenBank assembly GCA_900066565.1
MNYKTGLEDFIGKESLSKTLRNALIPTESTKIHMEEMGVIRDDELRAEKQQELKEIMDDYYRAFIEEKLGQIQGIQWNSLFQKMEETMEDISVRKDLDKIQNEKRKEICCYFTSDKRFKDLFNAKLITDILPNFIKDNKEYTEEEKAEKEQTRVLFQRFATAFTNYFNQRRNNFSEDNISTAISFRIVNENSEIHLQNMRAFQRIEQQYPEEVCGMEEEYKDMLQEWQMKHIYSVDFYDRELTQPGIEYYNGICGKINEHMNQFCQKNRINKNDFRMKKLHKQILCKKSSYYEIPFRFESDQEVYDALNEFIKTMKKKEIIRRCVHLGQECDDYDLGKIYISSNKYEQISNALYGSWDTIRKCIKEEYMDALPGKGEKKEEKAEAAAKKEEYRSIADIDKIISLYGSEMDRTISAKKCITEICDMAGQISIDPLVCNSDIKLLQNKEKTTEIKTILDSFLHVYQWGQTFIVSDIIEKDSYFYSELEDVLEDFEGITTLYNHVRSYVTQKPYSTVKFKLHFGSPTLANGWSQSKEYDNNAILLMRDQKFYLGIFNVRNKPDKQIIKGHEKEEKGDYKKMIYNLLPGPSKMLPKVFITSRSGQETYKPSKHILDGYNEKRHIKSSPKFDLGYCWDLIDYYKECIHKHPDWKNYDFHFSDTKDYEDISGFYREVEMQGYQIKWTYISADEIQKLDEKGQIFLFQIYNKDFSVHSTGKDNLHTMYLKNLFSEENLKDIVLKLNGEAELFFRKASIKTPIVHKKGSVLVNRSYTQTVGNKEIRVSIPEEYYTEIYNYLNHIGKGKLSSEAQRYLDEGKIKSFTATKDIVKNYRYCCDHYFLHLPITINFKAKSDIAVNERTLAYIAKKEDIHIIGIDRGERNLLYISVIDVHGNIREQRSFNIVNGYDYQQKLKDREKSRDAARKNWEEIEKIKELKEGYLSMVIHYIARLVVKYNAVVAMEDLNYGFKTGRFKVERQVYQKFETMLIEKLHYLVFKDREVCEEGGVLRGYQLTYIPESLKKVGKQCGFIFYVPAGYTSKIDPTTGFVNLFSFKNLTNRESRQDFVGEFDEIRYDRDKNMFEFSFDYNNYIKKGTMLASTKWKVYTNGTRLKRIVVNGKYTSQSMEVELTDAMEKMLQRAGIEYHDGKDLKGQIVEKGIEAEIIDIFRLTVQMRNSRSESEDREYDRLISPVLNDKGEFFDTATADKTLPQDADANGAYCIALKGLYEVKQIKENWKENEQFPRNKLVQDNKTWFDFMQKKRYL

SEQ ID NO: 185 - protein, 1252 aa, Prevotella ruminicola
MIDLKQFIGIYPVSKTLRFELRPVGKTQEWIEKNRVLEGDEQKAADYPVVKKLIDDYHKVCIHDSLNHVHFDWEPLKDAIEIFQKTKSDEAKKRLEAEQAMMRKKIAAAIKDFKHFKELTAATPSDLITSVLPEFSDDGSLKSFRGFATYFSGFQENRNNIYSQEAISTGVPYRLVHDNFPKFLSDLEVFERIKSTCPEVINQASAELQPFLEGVMIDDIFSLDFYNSLLTQNGIDFFNQVIGGVSEKDKQKYRGINEFSNLYRQQHKEIAASKKAMTMIPLFKQILSDRDTLSYIPAQIRTEDELVSSITQFYDHITHFEHDGKTINVLSEIVALLGKLDTYDPNGICITARKLTDISQKVYGKWSVIEEKMKEKAIQQYGDISVAKNKKKVDAFLSRKAYSLSDLCFDEEISFSRYYSELPQTLNAISGYWLQFNEWCKSDEKQKFLNNQTGTEVVKSLLDAMMELFHKCSVLVMPEEYEVDKSFYNEFLPLYEELDTLFLLYNKVRNYLTQKPSDVKKFKLNFESPSLASGWDQNKEMKNNAILLFKDGKSYLGVLNAKNKAKIKDAKGDVSSSSYKKMIYKLLSDPSKDLPHKIFAKGNLDFYKPSEYILEGRELGKYKKGPNFDKKFLHDFIDFYKAAISIDPDWSKFNFQYSPTESYDDIGMFFSEIKKQAYKIRFTDISEAQVNEWVDNGQLYLFQLYNKDYAEGAHGRKNLHTLYWENLFTDENLSNLVLKLNGQAELFCRPQSIKKPVSHKIGSKMLNRRDKSGMPIPESIYRSLYQYYNGKKKESELTVAEKQYIDQVIVKDVTHEIIKDRRYTRQEYFFHVPLTFNANADGNEYINEHVLNYLKDNPDVNIIGIDRGERHLIYLTLINQRGEILKQKTFNVVNSYNYQAKLEQREKERDEARKSWDSVGKIKDLKEGFLSAVIHEITNMMIENNAIVVLEDLNFGFKRGRFKVERQVYQKFEKMLIDKLNYLSFKDREAGEEGGILRGYQMAQKFISFQRLGKQSGFLFYIPAAYTSKIDPVSGFVNHFNFSDITNAEKRKDFLMKMDRIEMKNGNIEFTFDYRKFKTFQTDYQNVWTVSTFGKRIVMRIDEKGYKKMVDYEPTNDIIKAFKNKGILLSEGSDLKALIAEIEANATNAGFYSTLLYAFQKTLQMRNSNAVTEEDYILSPVAKDGHQFCSTDEANKGKDAQGNWVSKLPVDADANGAYHIALKGLYLLRNPETKKIENEKWLQFMVEKPYLE

SEQ ID NO: 186 - protein, 737 aa, Prevotella sp.
MTGWVDSKTEKSNSGTQFGGYLFRKKNEIGEYDYFLGISSKTQLFRKNEAVIGDYERLDYYQPKANTIYGSAYEGENSYKEDKKRLNKVIIAYIEQIKQTNIKKSIIESISKYPNISDDDKVTPSSLLEKIKKVSIDSYNGILSFKSFQSVNKEVIGNLLKTISCLKNKEEFHDLIKKDYQIFTEVQAVIDEICKQKTFIYFPVSNVELEKEMGDKDKPLCLFQISNKDLSFAKTFSANLRKKRGAENLHTMLFKALMSGNQDNLDLGSGAIFYRAKSLDGNKPTHPANEAIKCRNVANKDKVSLFTYDIYKNRRYMENKFLFHLSIVQNYKAAKDSAQLNSSATEYIRKADDLHIIGIDRGERNLLYYSVIDMKGNIVEQDSLNIIRNNDLETDYHDLLDKREKERKANRQNWEAVEGIKDLKKGYLSQAVHQIAQLMLKYNAIIALEDLGEMFVTRGQKIEKAVYQQFEKSLVDKLSYLVDKKRPYNELGGILKAYQLASSITKSNSDKQNGFLFYVPAWNTSKIDPVTGFTDLLRPKAMTIKEAQDFFGAFDNISYNDKGYFEFETNYDKFKIRMKGAQTRWTICTFGNRIKHKKDKNYWNYEEVELTEEFKKLFDKYDIDYRDGNLKEEILKIDNRKFFDALIKLLQLTLQLRNSDDKGNDYIVSPIANADGKFFNSNDGCKELPLDADANGAYNIARKGLWVVRQIKDKKDKISKLSNQEWLKFAQEKPYLK

SEQ ID NO: 187 - protein, 1262 aa, Porphyromonas crevioricanis
MPWIDLKDFTNLYPVSKTLRFELKPVGKTLENIEKAGILKEDEHRAESYRRVKKIIDTYHKVFIDSSLENMAKMGIENEIKAMLQSFCELYKKDHRTEGEDKALDKIRAVLRGLIVGAFTGVCGRRENTVQNEKYESLFKEKLIKEILPDFVLSTEAESLPFSVEEATRSLKEFDSFTSYFAGFYENRKNIYSTKPQSTAIAYRLIHENLPKFIDNILVFQKIKEPIAKELEHIRADFSAGGYIKKDERLEDIFSLNYYIHVLSQAGIEKYNALIGKIVTEGDGEMKGLNEHINLYNQQRGREDRLPLFRPLYKQILSDREQLSYLPESFEKDEELLRALKEFYDHIAEDILGRTQQLMTSISEYDLSRIYVRNDSQLTDISKKMLGDWNAIYMARERAYDHEQAPKRITAKYERDRIKALKGEESISLANLNSCIAFLDNVRDCRVDTYLSTLGQKEGPHGLSNLVENVFASYHEAEQLLSFPYPEENNLIQDKDNVVLIKNLLDNISDLQRFLKPLWGMGDEPDKDERFYGEYNYIRGALDQVIPLYNKVRNYLTRKPYSTRKVKLNFGNSQLLSGWDRNKEKDNSCVILRKGQNFYLAIMNNRHKRSFENKVLPEYKEGEPYFEKMDYKFLPDPNKMLPKVFLSKKGIEIYEPSPKLLEQYGHGTHKKGDTFSMDDLHELIDFFKHSIEAHEDWKQFGFKFSDTATYENVSSFYREVEDQGYKLSFRKVSESYVYSLIDQGKLYLFQIYNKDFSPCSKGTPNLHTLYWRMLFDERNLADVIYKLDGKAEIFFREKSLKNDHPTHPAGKPIKKKSRQKKGEESLFEYDLVKDRRYTMDKFQFHVPITMNFKCSAGSKVNDMVNAHIREAKDMHVIGIDRGERNLLYICVIDSRGTILDQISLNTINDIDYHDLLESRDKDRQQERRNWQTIEGIKELKQGYLSQAVHRIAELMVAYKAVVALEDLNMGFKRGRQKVESSVYQQFEKQLIDKLNYLVDKKKRPEDIGGLLRAYQFTAPFKSFKEMGKQNGFLFYIPAWNTSNIDPTTGFVNLFHAQYENVDKAKSFFQKFDSISYNPKKDWFEFAFDYKNFTKKAEGSRSMWILCTHGSRIKNFRNSQKNGQWDSEEFALTEAFKSLFVRYEIDYTADLKTAIVDEKQKDFFVDLLKLFKLTVQMRNSWKEKDLDYLISPVAGADGRFFDTREGNKSLPKDADANGAYNIALKGLWALRQIRQTSEGGKLKLAISNKEWLQFVQERSYEKD

SEQ ID NO: 188 - protein, 1244 aa, unidentified
  REGION 1..1244: note = Sequence from GenBank assembly GCA_900315115.1
MKDLKQFIGIYPVSKTLRFELKPIGKTQEWIEKNHVLEHDWKRTEDYPKVKEMIDAYHKLCIGKSLKNMDFDWVPLRDAIERNRQEKSDGSKKALEAEQTKMRNKIHDQLSKFEHYKKLNADTPSLLINHILPQEDALESFKKFATYFEGFQKNRKNIYSKEAISTGVPYRLVHDNFPKFLANIEVFENLQELCPEVIQQAATEMAPFLQGVMIEDVFTVGFYNTILTQDGIDFYNQILGGVVKDERHYQGINQLTNLYRQAHPDLTANRRSMTMVPLFKQILSDRETLSDISKPIESEEQLIKTVTSFYRRITDFTLNGNCVNIISELAALAQSLNTYNPEGIFISAKSLTDVSHTLYGHWNKLNEKLYEKAVEAIGDIQVAKNRKKVEAYLNKDAYTLSELSFGDDISLAQYFTSISAASGATNSLWVQFQSWCKTAEKPKYVHNEAGTELVKMLLDSIMNVLHKCSALVVSMENDLDKDFYNKFLPLYAELENVILVYNRVRNFLTQKPSSTGKIKLKFDIPSLGAGWGINKEKKNKAILLFKDGRSYLGIMNVKGTLDFDDKAEPGEPTYKKMVCVNHSKPYMDLPNSFFRQTGIDKYKPSERILKIYEAFKKDSKSVDIKEVRGLIDYYKEAITRNEDWNSVSFTYSPTETYETIDDFYKEVAKQSYQVSFKDISQKLVDEWVENGQLYLFQLYNKDYAEGAHGRKNLHTLYWESLFTAENLSDIVIKLGSNAELFYRPQAIKKPVKHEVGTKMLNRRDKSGMPIPDAIYLSLYQFYNGKKEEAELTDEERAYISQVIVKDVQHEIIKDRRYTKQFHYQFHVPIVFNANANGKVKFNDKVMDYIQDNPDVNIIGIDRGERHLIYLTLINQRGEILKQKTFNVVGNYNYQEKLKQREKERKNAQKSWQDIERIKDLKEGFLSAVVHEIAQMMIEYNAIVVLEDLNRGFKRGRFKVERQVYQKFEKMLIDKLNYLSFKDREIANEGGILRGYQLTEMTLNYSDIGRQTGFLFYIPAAYTSKIDPVTGFVNHFNLNDITNAEKRKAFLMKMERMEMKNGNVEFEFDYRKFKTFQTDYQNVWTVNTSGKRIIFDTETRKAKDVYPTKEIVQAFANRGIVLEEGMDLKAIIAEVEPDSKNAAFFRSLFYAFENTLRMRNSNAETQEDYILSPVAISGKQFCTTDEANKGKDANGNWLSKLPVDADANGAYHIALKGLYLLNNPQTKKIENEKWFQFMIEKPYIE

SEQ ID NO: 189 - protein, 1252 aa, unidentified
  REGION 1..1252: note = Sequence from GenBank assembly GCA_900315765.1
MNNLKQFIGIYPVSKTLRFELRPIGKTQEWIEINKVLEGDVQKAADYPTVKKLIDEYHKICIHDSLKNVHFDWAPLKEAIVIFQKTKSDESKKRLEAEQTIMRKQIAAAIKDFKHFKELTAATPSDLITSVLPEFSDDDSLMSFRGFATYFSGFQENRINIYSQESISTGVPYRIVHDNFPKFLSNQEVYDRIRSVCPEVIKQASEELQPFLEGVMIDDIFSLDFYNSLLTQDGIDFYNRVIGGVSEEGKQKYRGINEFSNLYRQQHKDLAASKKAMTMIPLFKQILSDRETLSYIPVQIESEDELVSSIKQFYEHITHFERDGKTVNVLSELVAVLGNIDSYNPDGICISASKLTDISQKVYGKWSIIEEKLKEKAIMQYGDISVAKNKKKVDAYLSRKAYCLSDLCFDEVVSFSRYYSELPQMLNAINGYWMQFNEWCRSDEKQKFLNNPMGTEVVKCLLDAMMELYHKSAVLVMPEEYEVDKSFYNEFIPLYEELDTLFLLYNKVRNYLTRKPSDVKKFKLNFESPSLASGWDQNKEMKNNAILLFKDGKSYLGVLNAKNKAKIKDAKGDASSSSYKKMIYKLLSDPSKDLPHKLFAKGNLDFYKPSEYILEGRELGKYKKGPNFDKKFLHDFIDFYKAAIAIDPDWSKFNFQYSPTESYEDIGAFFSEIKKQAYKIRFTDITESQVNEWVDNGQLYLFQLYNKDYAEGAHGRKNLHTLYWENLFTDENLSNLVLKLNGQAELFCRPQSIKKPVSHKIGSKMLNRRDKSGMPIPENIYRSLYQFYNGKKKESELTTAEKQYMDQVIVKDVTHEIIKDRRYTRQEYFFHVPLTLNANADGNEYINEQVLNYLKYNPDVNIIGIDRGERHLIYLTLINQRGEIIKQKTFNIVNNYNYQVKLEQREKERDEARKSWDSVGKIKDLKEGFLSAVIHEITKMMIENNAIVVLEDLNFGFKRGRFKVERQVYQKFEKMLIDKLNYLSFKDREVGEEGGILRGYQMAQKFVSFQRLGKQSGFLFYIPAAYTSKIDPVTGFVNHFNFNDITNAEKRKDFLMKMERIEMKNGYIEFTFDYRKFKTYQTDYQNVWTVSTFGKRIVMRIDEKGYKKMVDYEPTNDIIYAFKNKGILLSEGSDLKALIADVEANATNAGFFGTLLYAFQKTLQMRNSNALTEEDFILSPVAKDGHHFCSTDEANKGRDAQGNWVSRLPVDADANGAYHIALKGLYLLRNPETKKIENEKWFQFMVEKPYLE

SEQ ID NO: 190 - protein, 1247 aa, unidentified
  REGION 1..1247: note = Sequence from GenBank assembly GCA_900316295.1
SMKQFTNLYPVSKTLRFELQPIGKTKENIEKNGILTRDEKRAKDYQVVKGFIDEYHKQYIKDRLWNFKLPLASEGNLDSLEEYQMLYEMPRRDDTHEEDFSEVKDNLRAIITKRLTENGSAYDRIFKKELIREDLIEFLNNEEDKALVRQFADFTTYFSGFHENRRNMYSAEEKSTAIAYRLIHQNLPKFMDNMKAFAKIAETSVAEHFSNIYEGWEEYLNVGSIEEIFRLDYFSETLTQPHIEVYNYIIGKKVLEDGTEIKGINEYVNLYNQQQKDKSKRLPFLVPLYKQILSDREKLSWLAEEFDSDEKMLGAINESYTHLHELLMGEENESLRSLLLHLKEYDLSQINITNDLSLTNISQHLFGRYDVYSNAIKEQLKIIIPRKKKETDEEFEDRISKIFKTQKSFSISFLNNLPHPETENGKPRSVEEYFISIGTINTKTTQKENLFAQIENAYENVRVILQMKDTGNALSQNKPAVTKIKALLDAFKDLQHFIKPLLGSGEELEKDELFYGSFQMIWDELNTVTPLYNKVRNWLTRKPYSTEKIKLNFDNSQLLGGWDVNKEPDCTGILLRKDSFYYLGIMDKKANRVFETDITPSEGDCYEKMVYKQLGQISQQLPRIAFSKTWQQKLSIPEDVIKIKKNESFKKNSGDLQKLISYYKSFISQHDEWNSYFDINFTDRNDYKNLPDFYSEVDSQFYSLSFSRVPSSYINQLVDEGKLYLFRIWNKDFSEYSKGTPNLHTLYWKMLFDERNLSNVVYKLNGQAEVFYRKASIQPENRIIHKANLSIVNKNELNKKRTSTFEYDIIKDRRYTVDKFQFHVPITINFKGTGQLNINPIVQETIRQGGFTHIIGIDRGERHLLYLSLIDLNGNIVKQMTLNDIFNEYKGQTYKTNYHDLLVKREGDRTDARRSWDTIETIKELKEGYLSQVVHVISKMMVEYKAIVVLEDLNTGFMRGRQKIERQVYEKFEKMLIEKLNCYIDKQADATEVTGLLHPLQLTCEAKKWKRSHQCGCLFYIPAWNTSKIDPVTGFVNLLDTRYDTREKARLFFSKFQRISFNTEKGWFEFTFDYNDFTTKAEGTRTQWTLCTHGERIRTFRNPQKNNQWDNERIVLTDEFKKLFDQKEIDISGNMKEAICNQKDAQFYRDLLGLMKLLLQMRNSIANSEEDYLLSPIADKNGHFFDSRERISSLPVDADANGAYNIARKGLWIVRKIRNTSEGEKLSLAITNKEWLLFAQSKPYLND

SEQ ID NO: 191 - protein, 1257 aa, unidentified
  REGION 1..1257: note = Sequence from GenBank assembly GCA_900317695.1
MNDLKTFIGIYPVSKTLRFELRPIGKTQEWIEKNKVLESDEQKSADYPKVKALIDEYHKVCIHESLKDVSFDWAPLKNALGEYQKEKSDESKSVLDREQTNMRKKVAAAIKSFQHYEQLTAPTPQKLIDDVFPGRYESEALKSFKRFAIYFRGFQENRNNIYSADAISTGVPYRLVHENFPKFITNIEVYNNIKANCPEVIEQVETELQPFLKEIRIESIFNLDYYNSLLTQDGIDFYNQVLGGVAEEGKQKYRGINEFSNLYRQQHPEMAGKKKALTMIPLFKQILSDRETLSYIPQQIESERQLVSMLKQFHSHILNYEYNGNSVNVLRALSRMISKVDEYNPEGIYIAAKALTDISQVLYGKWSVLSDKLYDSAVKKYGEPSTAKNKKKIDAYVSKEAYSLSEVGLIGDVGLSSYFSSVSQSIEQVDEKWARFIRWCDNDEEQLFLNNPEGTELVRALLDSYMDILHRCGVLVVSVENDLDKDFYNDFFPIYAELENVIIIYNRVRNYLTMKPYDTKQFKLNFGVPTLGDGWDQNKEKDNKTILLFKGGLSYLGIMNPYNTPKIKECKVDSEDTYSKMVYKLLPGPNKMLPKVFFSKKGLQSFSPSEHIQEIYRNGSFKKGSPDFNHERLHELIDFYKDSISKHPDWSKFDFKFSPTKSYEDISAFYDEISKQGYKIQFINISEQQVNEWVANGQLYLFQLYNKDYAEGAHGRKNLHTLYWENLFTPENLNNLVLKLNGQAELFYRPSSIKTPVKHVVGSKMLNRRDKSGMPIPETVYKSLYQYFNGKKLKSELTADEIAYIDQIVVKDVTHEIIKDRRYTKPEYFFHVPITFNANAEGNEYINEKVLDYIKDNPDVNIIGIDRGERHLIYLTLINQRGEILKQKTFNLVGNYNYHAKLEQREKERDAARKSWQSIGKIKDLKEGFLSAVIHEIAVMMIENNAIVVLEDLNSGFKRGRFKVERQVYQKFEKMLIDKLNYLSFKDCKADEVGGILRGYQLAQKFTSFQKLGKQSGFLFYIPAAYTSKIDPVTGFVNHFNFNDVTNAEKRKSFFMNMNRIEMKNGDIEFEFDYRKFKTYQSDYRNVWTVNTSGKRIVFDAEKRQSKDYYPTKEIVAAFKDKDIILKDGMNVKSLIANIEANARNASFFGSLFYAFQKTLQMRNSNATTEEDYILSPVVHNGKQFCTIDEVNKGKNAEGNWISKLPVDADANGAYHIALKGLYLLMNPQTKKIENEKWFKFMVEKPYIELKNIDNFV

SEQ ID NO: 192 - protein, 816 aa, unidentified
  REGION 1..816: note = Sequence from GenBank assembly GCA_900319475.1
MTLGAVNTGTTQKENLFAQIENAYEDARFVLQLKDTGDTLSQNKSAVAKIKALLDALKDLQHFIKPLLGSGEENEKDDLFYGSFQMMWDELDTITPLYNKVRNWLTRKPFSTEKIKLNFDNSQLLGGWDVNKEPDCTGVLLRKDGLFYLGIMDKKSNHIFETDVIPTDGECFDKIDYKLLPGANKMLPKVFFSKSRIDEFAPSESIITSYKRGTHKKGVGFNLAECHRLIDFFKQSINKHEDWSKFGFHFSDTKTYEDISGFYREVEQQGYMLSSRPVSSSYIDTLVSEGKLYLFRIWNKDFSEFSKGTPNLHTLYWKMLFDERNLSDVVYKLNGQAEVFYRKASIKPENRIVHKANQPVANKNELNTKLASTFEYDIIKDKRYTVDKFQFHVPITINFKAAGQTNINTIVQDAIRQEEFSHIIGIDRGERHLLYLSLIDLKGNIVKQMTLNEIINEYKGQTYKTNYHDLLAKREGDRTNARRSWETIETIKELKEGYLSQVVHIISKMMVEYNAIVVLEDLNTGFMRGRQKIERQVYEKFEKMLIEKLNCYIDKQVSPTAKGGLLNPLQLTCDAQKWKRSHQCGCLFYIPAWNTSKIDPVTGFVNLLDTHYDTREKARVFFSKFQRINYNAQKGWFEFAFDYNDFTSKAEGTRTQWTLCTQGERIRTFRNPQKNHQWDDERIALTDAYKQLFDKYDIDINGNIKEAISAQTDAQFFKELMGLMKLLLQMRNSITNSEEDYLLSPVADDAGHFFDSREGISNLPIDADANGAYNIARKGLWIIRKIQETQSGERISLSITNKEWLQFAQTKPYFND

SEQ ID NO: 193 - protein, 538 aa, unidentified
  REGION 1..538: note = Sequence from GenBank assembly GCA_900319825.1
MNSAIADTNKPFLLFKISNKDLSYAEMHSKGIRNSRGVDNLHTMYFKALMNGNQSVFDIGTGEIFFRRASINIDKPTHSSKLPIQKKNMKGESTFTYDLIKDKRFTVDKFGFHLSIIQNYQAINKANVNAMVRTFIHSNPNMHIIGIDRGERHLLYVTVIDIKGNIKEQFSLNHIVNEYKGNTYHTDYHAILEKREEERQKERQSWNTIESIKELKQGYLSQVIHKVVTLMVKYKAIVVLEDLNMGFKRGRQKVESSVYQQFEKALIEKLNYLADKQQNPNEYGGLLKGFQLTNKFTSFREMGKQNGFLFYIPAWNTSKIDPVTGFVDLLHPKYESVEKARAFICKFKNIRFNENKGWYEFVFDYNDFTTKAEGTQTTWTLCTQGSRIETFRNKEKNSSWDNREINLTKEFHSLFESCGIAPNENLKEVIAKQTEKSFFERLLKLLNLTLQMRNSITGTDIDYLISPVANKDGQFYDSRNCKDSLPENADANGAYNIARKGLWVVRQIQQAANTDKVQFSITNKEWLNFAQTKPYLND

SEQ ID NO: 194 - protein, 853 aa, unidentified
  REGION 1..853: note = Sequence from GenBank assembly GCA_900319865.1
MSNRKKWIDSFDSISIKDIDEYVKEFYTAKGITDEKSVIDYFSNLGKDENGTTLFEIVELAYSEVKDVLNTTPQGNLRDEKHSDEVNKIKKLLDSLKKLQWFALYLKGSGEESGRDNAFYADYNRLMEVVQEVNPLYNSVRNYLTQRPYSEEKIKLNFESSQLMNGWDMNKERDCLGVILRKDGLYYLAIMNKQDNTVLSADSIKSDGDCYEKMILKSISMSTGVGGFVRKCFGTAQKCGWVCPANCLNHEGKIIVADSEVTNNLTQLIDCYKDFFNKYEKDGFKYKDFGFKWAESSEYRSLKEFFNDIRRQSYMMKFQRVSVSYINQLVKDGKIYLFKIYNKDFSPYSKGTPNMHTMYWRALFSEDNLHNLVYTLNGNAELFYRKKSLEYDAKTMKYGHHHAELKDKFNYPIIKDRRYTEDKYFLHVPITLNFKAVEDNKISIKVRELIKENGIEHIIGIDRGERNLLYLSMIDLKGNIVKQLSLNEILNTYSGEMVDYHAKLDKRENEHDEARKNWQTIEGIKNLKEGYMSQVVHIVSKMMVEYKAIVVLEDLNGGFMRSRQKVEKQVYQKFETMLIEKLNYLVDKKKPVSEAGGLMNAYQLADEYKGFQKVGKQSGFLFYVRAWNTSKIDPATGFVSLIHAKYENIDNAKKLISIFDEIRYNKEKDFFEFVISDYSKFNTKAIGTQLDWTLCSFGDRIVTYRDNNNGGNWEHKKVKLSQEFKNLFDQTNIDYTKSLKESILSQNEAPFFRKMLDLLGLMLQMRNSNPNTGEDFILSPVANDKGEFYDSRNYKEEDNLPIDADANGAYNIARKGLWTMQQIKKSDNLEKVDLALKDVDWLCFAQQKPYLVD

SEQ ID NO: 195 - protein, 1260 aa, unidentified
  REGION 1..1260: note = Sequence from GenBank assembly GCA_900320305.1
NSSMNYSEFTGLYPLSKTLRFELKPIGKTKENIEKNGILERDNERAVAYKAVKKVIDEYHKAFIELMLDGFELDKSSLDEFYYLYHLPTSDPKRKTDLTKVQEVLRKQISERFTKSEQYKRLFGKELIREDLVEFVKTPQYEKIIREMPGNERLTDKEVKQIQESVLNDIAQFDDFTTYFVGFYDNRKNMYVADDKATSIVHRMIDENLTKFVDNMDVFDRIAASDVATHFNELYKALEPYLNVNEITELFHLDYFSMVLTQKQIDVYNAIIGGKVLDDGTKVQGLNEYVNLYNQQQKDKSKRLPKLKPLFKQILSERNAISWLPDEFESDNEMLQSIRKCYHDLKEQVFGSLKTLLGSIKDYDLEHIYLPNDLQLTDIAQKHFGTWSVIRYAVVEDLKANNPQKKKEDVEEYEKRLAKLHDSYSIAYLNGIIQGKVEDFKPIEDYFAGMGAEDNEKGQKLNHFARIENAYTEIKSLLDTDYPKGKSLSQDKANVEKTKNLLDAIKDLQHFVKPLLGNGTESEKDNQFYGEFTPLWEALDQITPLYNMVRNRMTQKPYSNEKIKLNFDNSTLLAGWDLNKEVDNTCTLLRKDGNYFLVIIDKRNNKVLKPENLVSEGDCYEKMEYKLLPGANKMLPKVFFSKSRIDEFKPSESVLRNYKNETHKKGDNFNLDDCHALIDFFKESINKHEDWSKFGFRFSDTNSYEDLSGFYREVEQQGYKITFRNVSVDYINQLVDEGKIYLFQIYNKDFSPFSKGTPNMHTLYWRMLFDERNLADVVYKLNGEAEVFFRKHSIKVDKPTHPANKPIANKNAQNEKKESTFAYDLIKDRRYTVDKFQFHVPITMNFKAAGLNNINPLVNAYLKESNATHIIGIDRGERHLLYLSLIDLKGNIVEQYSLNEMVNEYKGNTYRTNYHDLLDAKEKQRDEARRSWQTIENIKELKEGYMSQVIHKIAELMVKYNAIVVLEDLNMGFMRGRQKVEKQVYQKFEKMLIDKLNYLVDKKLDAEEKGGVLNAYQLTNKFESFQKLGKQSGFLFYIPAWNTSKMDPTTGFVNLFDTRYENMEKSKVFFGKFDSIRYNSAKGWFEFAFDYDNFTNKAEDTKTKWTLCTYGSRIETRRNPEKNNEFDSVEIDLTGKFKALFSKHQIDLNGNLKEQICSQNDASFFKELLHLLHLTLQMRNSVTNSEVDYLLSPVMNTSGEFYDSRTCGKNLPENADANGAYNIARKGLWIIEQIKQTDDLSKLKLAISNKEWLRHAQGLY

SEQ ID NO: 196 - protein, 1282 aa, Lachnospira sp.; identical to SEQ ID NO: 49

SEQ ID NO: 197 - protein, 1305 aa, unidentified; identical to SEQ ID NO: 19
  REGION 1..1305: note = Sequence from GenBank assembly GCA_902362905.1

SEQ ID NO: 198 - protein, 1260 aa, unidentified
  REGION 1..1260: note = Sequence from GenBank assembly GCA_902363805.1
MNKNKTIFSETIGQTYVSKTLKNTIIPIGATQLNIERNGLITEDKIRSEKRQELKKIMDDYYRYFINNTLSGNLAKTIEWGELFRAIDNNYINNSDKTKNELKNIQKKKRTELNKLFKSNDDYKKMFNAKLLSDILPEFINKQKISNTEKEERLNTVNLFNKFTSSFTDFFINRENIFADDKSTSICYRIVNENAWIFYQNYLIYNKIKEDAEKEIITIENNNVDGLDGFTLNSIFNFDFYGMLMNQKGIRFYNDICGIVNAHMNLYCQKYKKKAAKYRLKRMHKQILSIDESTFEVPKMLESDKEVYDLVNGFLYKLNEKKVLDRIRKISEDVTSYDLNKIYVCEKNYENLSLFMCRNWSVLRDSIKAFYQENTTGSNAGKEKKIEKLMKEDKYRSLQNINELINKYNSNSIERKAEEYIVNINEKLENKELVQLTNKEDISLIEDEESGEELKRVLDLIMSINHWIKMFIIDEEVDKDMAFYTEIEDIYYELEPLKSIYDKVRNYITQKPYSKEKIKLNFGIPTLAKGWSKTKEYDNNAIILIRENKYYIGIFNAKNKPDKTVIEGHKKKNDSDYKKMVYMFLTKPRLMLPKVFLSKKGIATYKTSEYILDGYRKGKHNKSSKNFDVNYCRDLIDYFKDCINKRDEWKGYKFKFSETSTYEDINDFYKEIEKQAYTIQWTYIDEKDIDEMNEKGQLYLFQIYNKDFSEKSTGTKNLHTMYFENLFSEENLKNIVLKLDGNAEVFFRKSSIKQPIIHKKGSILVNKGYNEQKENEERKTIPDEVYTELYKYFNKIGKVKLSNEAKKLIDEDKVEYFTSDYDIVKDYRYTVDKYFLHLPIKINCNAENYSPVNDIALKNIAENNDMHIIGIDRGERNLIYVSVIDLHGNIIEQKNFNIINGVNYKEKLKQRESERDSARKNWKQIGKIKDIKEGYLSLVIHEITSLVLKYNAIIAMEDLNMGFKRGRFKVERQVYQKFENMLISKLNYLVDKNKAVNEEGGVLKGYQMTYIPKSLKELGRQCGYIFYVPAAYTSKIDPTTGFVSVFNYKEMDDEKFVTSFDSIKYDKNRQKFALKFDYTNFITHNVKLAKNEWTIYSNGTRKIRKYRNDKWNSPDNVNLTNEIIKLMEQYNIQYDNEQDILEQVETLETKNKNNFCKEMKKLVKYIVQMRNSLPDNDSIEYDEIISPVLNESGEFYNSEEKNKKLPLDADANGAYCIALKGLYEVKQIKNNWKKGEKFPRKTLKISHNDWFDFIQNKRYL

SEQ ID NO: 199 - protein, 1259 aa, Eubacterium ventriosum; identical to SEQ ID NO: 156

SEQ ID NO: 200 - protein, 1304 aa, Acidaminococcus sp.; identical to SEQ ID NO: 3

SEQ ID NO: 201 - protein, 1257 aa, unidentified; identical to SEQ ID NO: 191
  REGION 1..1257: note = Sequence from GenBank assembly GCA_902755295.1

SEQ ID NO: 202 - protein, 1252 aa, unidentified; identical to SEQ ID NO: 189
  REGION 1..1252: note = Sequence from GenBank assembly GCA_902756705.1

SEQ ID NO: 203 - protein, 853 aa, unidentified; identical to SEQ ID NO: 194
  REGION 1..853: note = Sequence from GenBank assembly GCA_902758855.1

SEQ ID NO: 204 - protein, 1244 aa, unidentified; identical to SEQ ID NO: 188
  REGION 1..1244: note = Sequence from GenBank assembly GCA_902759135.1

SEQ ID NO: 205 - protein, 816 aa, unidentified; identical to SEQ ID NO: 192
  REGION 1..816: note = Sequence from GenBank assembly GCA_902759185.1

SEQ ID NO: 206 - protein, 1271 aa, unidentified; identical to SEQ ID NO: 72
  REGION 1..1271: note = Sequence from GenBank assembly GCA_902761105.1

SEQ ID NO: 207 - protein, 793 aa, unidentified
  REGION 1..793: note = Sequence from GenBank assembly GCA_902761465.1
MEQALSNLLYNDDAQWFKWYDLVRNYLTKKPQDDVKENKLKLNFDNPILLGGWSDGQEKVKSATLLKYMNEMYLCILKTRNIFDTSKENPIYIEHSDASRLILRNLKFQTLAGKGFKGENGITYGEMGKSDPQKAIQCLQKIIAERYVSKYPLLEEYVNNAYTDKSKFDAAITETLKQCYVCEFEPIDWNLVVEKQNNGELFLFKIHCKDYMPKVSGKKDLQTLYWEDVLSEGSKHQLCAGAEIFMRKPVAKAPRKKHSVGSKLVNKKDSDGNTIPERIYSEIYLYVNGKTESISAEAQRYIDEQKAVIKDVKHEIIKDKRFYGETKFMFHCPVKLNYESKGYKGPNYAYPEVNAAIRESLQQSDNLQFIGIDRGEKHLVYSCTLDKDCNIIACHDHDNINGTDYVQKLEDVANERIIAKKNWQAEDKIKDLKSGYISHVVHRLVEEVIKDGNTIEPHAYIVLEDLNTEMKRGRQKIEKQVYQNLETALAKKLNFVVDKDAQPNELGSVGKALQLTPPISNYQDIEGKKQFGVMLYTRANYTSVTDPATGWRKTIYLKNGKEEEIKKQVLEKFSDLGFDGRDYFFEYTETHAGHTWRLYSGKDGQPLPRFQNKKQLQQDKNIWVPEQVNVVEILDNLFAHFDKTKSFKQQIEQGVELVKIERRKETAWQSLRYALDLIQQIRNTGTEQKDDNFLYSPVRNSKGEHFDTRNHANNGKLSAIKDADANGAYNIARKGLIMDAHIKYWMACGQPSKKNTLDLFVSDREWDLWLLDRKGWEQELPAFALRNANESKD

SEQ ID NO: 208 - protein, 552 aa, unidentified
  REGION 1..552: note = Sequence from GenBank assembly GCA_902761775.1
MDDVEILLKSKVFSYFTVSQSELDEVLVREEKPLYLFKITNKDLSYAETHEKGLRKTRGTDNLHTLYFKALMSGNQSVFDIGSGAIFFREKKINYTDEQMRKGHHHEMLKDKFNYPIISNKRYAFDKFQFHLSISINYNADKNKDINPMVNAYLKESNSTHIIGIDRGERHLLYLSLIDLQGDIVEQYTLNEIGNTNYHDLLGIKEKQRKEARPNWMEIENIRELKEGYMSQVIHIIAQLMVKYNAIVVLEDLNMGFMRGRQKVEKQVYQKFEKMLIDKLNYLVDKQCNATELGGVLNAYQLTNTHKKFLEQYGNQKNALGKQCGFIFYIPAWNTSKMDPTTGFVNLLDTHYENMEKAKAFFGKFKSIRNNAAKGWFEFEFDYDNFTTKAADTRTPWTLYTHGTRIETKRDPKQKNNFVSEEFDLTSKFKELFVKYKIDLNDNLMEQICLQNDASFFKELLHLLQLTLQMRNSKIGTDVDYLISPVMNDKGKFYDSRNCGKNLPENADANGAYNIARKGLWIIDQIKRTDDLSRLRLAISNKEWLQYAQKMV

SEQ ID NO: 209 - protein, 1247 aa, unidentified; identical to SEQ ID NO: 190
  REGION 1..1247: note = Sequence from GenBank assembly GCA_902758325.1

SEQ ID NO: 210 - protein, 1239 aa, unidentified
  REGION 1..1239: note = Sequence from GenBank assembly GCA_902762935.1
MKEFTNLYPVSKTLRFELIPDKRTKEYLEHSDLIAKDEHRAESYKIVKKIIDRYHKKFIDDVLSTTKLQYTKEGKLNSLEDFYFLYTNSNKTDADKKALDKVKELLRKQIVDALKQDNRFKRIDKKELIREDILQVIKPEERALIDEFQDFTTYFTGFHENRKNMYSAEAQSTAIAYRLIHENLPKFVDNIAIFQKILKSPIAENLPTLYKDMEEYLNVNSIEEMFMLDYYSDVLTQPQIEVYNAIIGGRTLEDGTKIQGVNEFVNLFNQQQTSRDNRLPKLKPLFKQILSDKEAISWLPEEFESDQQLLNAVREFYISLTNNVMQQLKELLLNLPNYNLDKIYIPNDLALTDISQALYGDWSVIKNRIYEDFKNENPQKKNEKTEKYEERISKLIKEKDIFNIGYLNSCLTNQTKDVCAHFTSLGAVNTEAKQTENIFLQIENAYTDVRELLEYDYPQDKNLSQDRIQVNKLKTLLDAIKNLQHFVKPLLDTENEAEKDERFYGELSVLGEELNRITPLYNKVRNRMTRKPYSIEKFKLNFENSTLLDGWDVNKERDNSCVILRRNGLYFLAIMRKDSNKIFSDAPVGDGKDYYEKMEYKLLPGANKMLPKVFFSKSRIDEFCPSPSLLEHYEQGTHKKGEKFSLKDCHELIDFFKTSIKKHKDWSQFNFKFSPTESYEDLSGFYREVEQMGYKITYKNIPVSYIDTMVSKGRLFLFQIYNKDFSPYSKGTPNLHTLYWKMVFDEQNLADVVYKLNGQAEIFYRKKSLNLGKVTHPANQAIKNKNQLNPKKESSFKYDLIKDKRFTVDKFQFHVPITINFKAIGLGNINQSVNKYIQNSPDLHIIGIDRGERHLLYITVIDSKGNIKEQFSLNQIVNMHKGNTYETDYHELLDKREEERQKERQSWNTIESIKELKQGYLSQVIHKVVTLMVKYKAIVVLEDLNMGFKRGRQKVESSVYQQFEKALIEKLNYLADKQQNPNEYGGLLKGFQLTNKFTSFREMGKQNGFLFYIPAWNTSKIDPVTGFVDLLHPKYESVEKARAFICKFKNIRFNENKGWYEFVFDYNDFTTKAEGTQTTWTLCTQGSRIETFRNKEKNSSWDNREINLTKEFHSLFESCGIAPNENLKEVIAKQTEKSFYERLLKLLNLTLQMRNSITGTDIDYLISPVANTDGKFYDSRNCKDSLPENADANGAYNIARKGLWVVRQIQQAANTDKVQFSITNKEWLNFAQTKPYLND

SEQ ID NO: 211 - protein, 1235 aa, unidentified
  REGION 1..1235: note = Sequence from GenBank assembly GCA_902763365.1
MPLYDGFTNLQSMSKTLRFELQPVGDTQNVIDEKEMLREDFERSDCYPLVKKMIDEEHKKFIDAALSGFRFSDKLKEYVSVYEERDTDGTRSQKLDDISAVLRKEILAALKKHDDYSLVTKPAELISKRLLIEKQGAEKEAVYKFNKFAMYFTGLQEARGNMYTDEEKSTAIPYRAINDNLPKFLDNVISFRKISAVSEISEYFEKIEKELDIGVFSIRDFFTADFYSFAVAQRDIERYNMLIGGKKTEDEKQIIEGLNQYINKYNQTHPKERLPLLKPLYKQILSDRESLSFIPEKFSNDNELLQAVRFFYSERFKAGYFTGLFGAFDEFDMSGIYIRNGQDITDISQKVFGEWGIVNHYLSEKFDKENTKKFKSEEEKDKARNDYCKSHESISVSMLEEMAGQPGKVSGYISETVRSQTEYIGKCYSAAEALLDNNYPEERNLISDQDSIALIKELLDSIKELHRIILTFRGSGKETDKDEVFYGEYDKLIMMMDEFTPLYDKVRNYLTQKPYSEDKIKVNFGCSSLLNGWGQNYKTNAAHIFEMDGCFYLGIAQINLKSSDLSVMSAGVKNMKHIIYEFQKPDNKNTPRTFVRSKGTSFAPAVKEYDLPVESIIDIYDSGKFKTQYRKKNEKEYKESLAKIIDYFKLGLKRHESYKDFDFMWKPTEEYNDIAEFYSDSIASCYRISKEDISYEGLLELVRQGKFLLFRIYNKDFSKDSKGKPNLHTLYWRILFSEENRKGYPFRLNGGAEVFYRKASLHYSDEIMQNGHHYDELKCKFSYPIIKDRRYTCNKYFLHVPITINAVSQNVFSINNMVNAAVYREDNINVIGIDRGERNLLYVSVIDSRGNIIEQRSLNVIGDKNTDYQKKLADREKKRQENRQSWSPVKGIKNLKEGYLSQVVHIIAKLMVKYNAVLFMEDLNAGMKHSRVKFERQVYDKFENALVSKLCFYVDKEINIQQGENAPGGLLRAYQLANVPSGKKDRSKQNGFIFYIPAWNTSKIDPVTGFVNLFDLNLTSKQSIADFFGKFRDIRYNSEKKYYEFTFDYHDFGNRAKSDYRNSWTVCTFGKRIREFRNKDKNNQWDTEDYYPTDKLTELLKNHNIPKESETLKENILSVDDAKFYKELLYIFRLTLQMRNSVPGSTKPEDDYIISPVADRNGIFYDSREYDESSPLPCDADANGAYNIARKGLWVIGNIKAAGLGQKFRLSIKNDEWLELAQKGDMDGGGTDSNN

SEQ ID NO: 212 - protein, 776 aa, unidentified
  REGION 1..776: note = Sequence from GenBank assembly GCA_902769235.1
MWYDLVRNYLTKKPQDDVKENKLKLNFDNPILLGGWSDGQEKVKSATLLKYMNEMYLCILKTRNIFDTSKENPIYIEHSDASRLILRNLKFQTLAGKGFKGENGITYGEMGKSDPQKAIQCLQKIIAERYVSKYPLLEEYVSNAYTDKSKFDAAITETLKQCYVCEFEPIDWNLVVEKQNNGELFLFKIHCKDYMPKVSGKKDLQTLYWEDVLSEGSKHQLCAGAEIFMRKPVAKAPRKKHSVGSKLVNKKDSDGNTIPERIYSEIYLYVNGKTESISAEAQRYIDEQKAVIKDVKHEIIKDKRFYGETKFMFHCPVKLNYESKGYKGPNYAYPEVNAAIRESLQQSDNLQFIGIDRGEKHLVYSCTLDKDCNIIACHDHDNINGTDYVQKLEDVANERIIAKKNWQAEDKIKDLKSGYISHVVHRLVEEVIKDGNTIEPHAYIVLEDLNTEMKRGRQKIEKQVYQNLETALAKKLNFVVDKDAQPNELGSVGKALQLTPPISNYQDIEGKKQFGVMLYTRANYTSVTDPATGWRKTIYLKNGKEEDIKKQVLEKFSDLGFDGRDYFFEYTEAHAGHTWRLYSGKDGQPLPRFQNKKQLQQDKNIWVPEQVNVVEILDNLFAHFDKTKSFKQQIEQGVELVKIERRKETAWQSLRYALDLIQQIRNTGKEQEDDNFLYSPVRNSKGEHFDTRNHANNGKLSAIKDADANGAYNIARKGLIMDAHIKYWMACGQPSKKNTLDLFVSDKEWDLWLLDRKGWEQELPAFALRNANESKD

SEQ ID NO: 213 - protein, 621 aa, unidentified
  REGION 1..621: note = Sequence from GenBank assembly GCA_902770705.1
MLTALKEHPQIFQQLQNDEKFAKINSKVTKYLHETILSLVRIPRSQDYVNAEFTLFTEPQEVIDDLCQEKVFTYFVVDDAEIEQAMNDENKPFLLFKISNKDLSFADTFSKGLRKSRGTDNLHTMYFKALMSGNQSTIDIGTGEMFYRKSSISIDKPTHKANVPIKKKNPNNQGAESRFSYDLFKDKRFTVDKFGFHLSFIYNYLAQGQDVNKMAREYIHDHDDLHFIGIDRGERHLLYVTVIDSKGCIKEQFSLNEIVNEYQGNTYKTNYRSLLDKRDNERQRERQSWNTIEGIKELKQGYLSQVIHKIVSLMVKYHAVVVLEDLNMGFKRGRQKVESSVYQQFEKALIDKLNLLIDKKIDADQPGGLLHAYQLTNKFTSFRDMGRQNGFLFYIPAWNTSKIDPVTGFVDLLHPRYESVDKSRSFFCKFKSIRYNQDKGWYEFTMDYNDFTTKAEGSRTEWTLCTHGTRVETFRNAEKNSSWDSREVNLTDEFNALFATYGIEPQGNLKQAIAEQSQKEFFDKLTHLLALTLQMRNSITGTEVDYMISPVADENGKFFDSRTCGKELPENADANGAYNIARKGLWVARQIQAAHVDEKVNMAISNKEWLSFAQSKPYLND

SEQ ID NO: 214 - protein, 1262 aa, Fibrobacter succinogenes
MAKNTIFTQFTGLYPVSKTLRFELKPMGKTLEKIKETGVIENDKKRHNDYFDAKKIIDKYHKYFIDAALSKFSRIDWNPLKEAIEGSLDRSDASKKKLEKTQTEFRKKIAKALTTHDHYKELTASTPKDLFLKVFPDHFGKQPAIDTFDGFSSYFTGFQENRQNIYSDEAISTAIPYRLVHDNFPKFLSNIEVYKTLKDNAPSVLSDAENELKDFLNGKPLANIFELNAYNDVLTQSGIDFFNQVIGGISGEGGEKKTRGINEFSNLYRQQHPEFAQKRLATKMIPLYKQILSDRETKSFILESYSTDSQVQESVKEFFESQILNCDIAGRKVNVLNELTSLIKRIAEFDLGSIYINQEELSNISLELFKSWNTINAVLFKNAENRIGSAEKAANKKKIDAWMKSNEFSIATLNLAIAESDSEEISRVKIESYWNDFEAKVQSILCGDNRRNLDEFLSATFNENNALREDSEIIGKLKAFLDALIEIMHSIKPLISDAENRDLSFYNELMPLYDQLSLVVPLYNKIRNYATQKLTESEKFKLNFDNPTLADGWDQNKEDANTAILLLKNGLYYLGIMNAKNKPKIKDFKTSESEDCYDKMVYKLLPGPNKMLPKVFFSEKGLATFKPPKDILDGYNAGKHKKGDLFDIGFCHQLIDFFKESIAKHPDWKKFDFKFSDTSSYEDISGFYKEVTDQGYKITFSKIPTSQIDEWVNEGKLFLFQIYNKDFAPGAKGSPNLHTLYWKSVFSPENLKDVVVKLNGEAELFYRPSSVKKPYSHKVGEKLVNRIGKDGLPLPESVFGELFRYFNGKLDGELSDEAKRYLDVAVVKDVKHEIVKDRRYTQDKFEFHVPLTLNFKADSKNEYMNERVRHFLKDNPDVNIIGIDRGERHLLYMTLINQKGEILKQKSFNIVESVNYQAKLVQREKERDAARKSWSSVGKIKDLKEGFLSQVIHEITTTMIENNAIVVLEDLNFGFKRGRFCVERQVYQKFEKMLIDKLNYLVFKNKPEGDVGGVLKGYQLAEKFDSFQKLGKQSGFLFYIPAAYTSKIDPTTGFANLFNMTELTSAEKKKDFLSHFDDITYDGKNDRFLFGFDYKNFKCFQTDFIKKWTVYTQGKRIVYDKESKSAKEIFPVEIIKAALAKQNIALTDQLDVLSAINSVEASPKSASFFGNICYAFEKTLQMRNSIPNTDEDYLVSPVMNKRGEFYDSRSCDDALPQNADANGAYHIALKGLYLIKNVFDAGGKDLKISHEDWFKFAQSRNC

SEQ ID NO: 215 - protein, 789 aa, unidentified
  REGION 1..789: note = Sequence from GenBank assembly GCA_902773555.1
PVLQLTDTEDKLSQNKPAVGKIKALLDAFKDLQHFIKPLLGSGEENEKDELFYGAFQLIWDELDTVTPLYNKVRNWLTRKPYSTEKIKLNFDNAQLLGGWDVNKEPDCTGVLLRKDGFYYLGIMNKKSNRIFDADVTPADGICYEKIDYKLLPGANKMLPKVFFSKSRIDEFAPSEAILSSYKRGTHKKGADFSLSDCHRLIDFFKASINKHEDWSKFGFQFSDTKTYEDISGFYREVEQQGYMLSSHQVSEAYINQMVEEGKLFLFRIWNKDFSEYSKGTPNMHTLYWRMLFDERNLADVVYKLNGQAEVFYRKASIKAENQIMHPAHHPIENKNTLNEKRSSTFDYDLVKDRRYTVDKFQFHVPITINFKAIGQTNVNPIVHETIRRGGFTHVIGIDRGERHLLYLSLIDLKGHIVKQMTLNEIINEYNGLAHKTNYYDLLVKREGERTTARRSWDTIENIKELKEGYLSQVIHIISKMMVEYNAIVVLEDLNMGFMRGRQKIERQVYEKFEKMLIDKLNCYIDKQADSQSEGGLLHPIQLANKFESFRKLGKQSGCLFYIPAWNTSKIDPVTGFVNLFDTRYETREKAKLFFSHFQRICFNAEKDWFEFSFDYNDFTTKAEGTRTQWTLCSYGTRIRNFRNPLQNHQWDDEEIVLTEAFKALFDKYDIDIHANLKEAINAQTDAQFFKDLMGLMKLLLQMRNSKTNSEVDYLLSPVADEHGRFFDSRAGAGSLPDNADANGAYNIARKGLWVIRKIQETPEGEKLSLAITNKEWLEFAQTKPYLND

SEQ ID NO: 216 - protein, 818 aa, unidentified
  REGION 1..818: note = Sequence from GenBank assembly GCA_902774105.1
MKGNIPNATIEQALSNLLYNDDAQWFKWYDLIRNYLTKKPQDDAKENKLKLNFGTSSLLGGWSDGQEKTKVATLLKYHDEIYLCVLKTKNIFDTSKDNNPIYDITESEASRLLLRNLKFQTLAGKGFLGEYEISYGDMGKENPTKAIKCLQKIIKERYVNKYPLLEKFARNTYTDKAQFDAEITETLKECYVCQFVPIDWNVVTEKQDNEELFLFKILCKDYRPKSVGKKDLQTMYWEDVLSDGSKHQLCAGAEIFMREPVAKESPIIHRIGSKFVNKRDKDGDTIPEQIYREIYSYANGKKKTISAESRKYIDEQKVIIKDVKHKIIKDNRFYGETKYMFHCPIKLQFEAKDPKYAYSEVNTTVSNALQQSDNLQFIGIDRGEKHLVYSCIVDKDCKILKCGHHDVINGTDYVQKLEAVADERIVAKKNWQQQNKIRDLKNGYISHVVHRLVEETIKDNGKIAPHAYIVLEDLNTEMKRGRQKIEKQVYQNLETALAKKLNFVVDKDTKKGEIGSVSKALQLTPPINNYQDIEGKKQFGVMLYTRANYTSVTDPATGWRKTIYIKNGKEDDIKNQILDKFSDFGFDGDYYFEYTEANVGHTWRLYSGKNGKALPRFQNKKQALQDKNVWVPEKINVVDILNKLFAKFDKKKSFKSQIEAGVELQKDEERNETAWQSLRFALDLIQQIRNSGEKNSGDDNFLYSPVRNDKDEHFDTRNYKNNGELSEIRDADANGAYNIARKGLIMDTHIKHWINNGRPKTKIDGSEVSDLDLFISDREWDLWLLDREQWMKELPTFASKIAKYDSDAPQTAKRRKKR

SEQ ID NO: 217 - protein, 1334 aa, unidentified
  REGION 1..1334: note = Sequence from GenBank assembly GCA_902774245.1
MEHSLRDFTGLYSLSETLSFELRPLDSEFNPKPADRALADMKKYLDEDRKRAAQYASIKAILDEEHKKLIERVLSDVPGAIGRLKNRKAFAEILSDDGSGIRWSRLKEAEGAARNAKTEIREAKKTRKATSEADGAITTETKEEARFKDLQKKFRELIAALLDTDEKKKSLLEATPSKYIKGMLSEFGDALQPDTREALNTFEKFACYLKGFQENRANLYAAEPQVTAVANRVVNQNFPKFLTACRIMAHIQERYPEIISEAERNLAANLNGAPLMSRFQPDAFDLCLAQSGIDVYNTILGGFTLKDGTKIQGINETINLYRQQHADAANDRNLAPIPALYKQILSDRDTLSFIPEMFDSDRAVCDSILKFLESLKWETMQSDITSLLDSLDADDPGVFVEKSELTRISHKLFGDWSRIRAALERCAETKFTRKADREKWLNKDIYSLRELNELDFKLSEEDDIAEVPAITDFWRGAHRAEVFSAVESAIQAVLDTLHSEAYPEGDTEPRLRENENDVAAIKDLLDALTGLLHLLKPLQAESPDANMVFYADFNDFYARLDPVIPLYNRVRNYITQKPSEQKKVKLMFNCSTLADGWDRNKESDNNAVILLKDGNYYLAVIQPAQKQTDGKRERKVKFADFETDGAGPCFRKMVYKYLPGPNKMLPKVIFSKSNRDIFDPPAELLRKYEAGMHKKTSPNFDLKFCRELIDFFKVCIAKHEDWSKFGFQFADTAKYNGIDEFYNEISAQGYKMTFAPIPVQTVSDLIRDNKILLFQIYNKDFAPGSTGRQNKFTLYWKTLFEEENLKDVVFKLNGEAELFLRDPSVRKPFVHRKGDKLVNRTTKDGAPVSESVHAELCKFANGRIGYDGLSAEARGIWDNGQAVVKTATHDITKDRRFTTPKFLFHVPISINFKAPDAKAGINQKVLDYLRDNPGVKVIGIDRGERNLVYLSLIGRNGRILLQKSFNTVPQRRSDRTVEFDYHAKLDQREKERDAARKNWTSVNRIKDLKAGYLSQIVHEIAKLMVEHNAVVVMEDLNFGFKRGRFAIEKQVYQNFERALITKLNYLVFKDAETPADAGYVLKGLQLANKFESFEKLGKQSGFLFYVPAGYTSKIDPATGFVSLFQFGKYTSAEARKAFLGKFRSIRFDAARDAFAFTFDYRDFPAQGKELPGKSEWTVRSVGERIVYSPKKRESFVCKPTEIILDALAKRGIRPEDGFDLLRLIRETDGADRANAAFFNAVFEAFKLTVQMRNSDAKIGEDYILSPVMSADGTFFDSRKAPADMPRDADANGAYHIAMKGLYLLQNRFTAGTKKADLKISNQDWFDFIQNRHAR

SEQ ID NO: 218 - protein, 1234 aa, unidentified
  REGION 1..1234: note = Sequence from GenBank assembly GCA_902774255.1
NMDHFTNLYPVSKTLRFELIPDKRTKAILERTDLIAQDEHRAESYKLVKKIIDRYHKKFIDSVLGTLKLPLDELDSLHELYSKSQKSDADKKALEKIQDKLRKLIADALTKDSRYKRIDKKELIREDILSVIEPEEQALIDEFRDFTTYFTGFHENRRNMYSAEAQSTAIAYRLIHENLPKFIDNMATFEKIAASPVAKHFPQLYQEMAEYLNVREIGDLFKLDYYTELLTQSQIEAYNAVIGGRTVEESGKKIQGINEYVNLYNQQQPSRDTRLPKLKPLFKQILSDREAVSWLPEEFESDKDMLKAVKECYHSLNDHVFDPLRELLTNLSSYNLDGIYIPNDLSLTDISQAMFKDWSVIKKAIAEDVKRNCPLKRNEKADNYEERISKLIKRENSFSIGYMNHCIQEKDICDHFATLGASDNGEEQIVNLFLQIQNAYTDAQSLIENDYPEDRNLAQDKENVARLKALLDAVKALQRFVKPLLGNGDEPDKDERFYGELAVLWEELDHITPLYNKVRNRMTRKPYSIEKFKLNFQNSTLLDGWDLNKERDNTGVIMRKDGKYFLAIMNKQFNRIFVDAPQAGHDEDTFEKMEYKLLPGANKMLPKVFFSKSRIEEFKPSPELLEHYEKGTHKKGDNFSLKDCHELIDFFKASIAKHEDWSKFDFHFSPTDTYEDLSGFYREVEQMGYKISYKQIPVSYIDKMVEEGKLFLFQIYNKDFSPYSKGTPNLHTLYWKMVFDERNLADVVYKLNGQAEVFYRKKSLDYDRPTHPANQAIKNKNPETTKKESTFDYDIIKDKRFTMDKFQFHVPITINFKATGSGSINPLVNQYIHDHDDLHFIGIDRGERHLLYVTVIDSKGCIKEQFSLNEIVNEYQGNTYKTNYRSLLDKRDDERQRERQSWNTIEGIKELKQGYLSQVIHKIVTLMVKYHAVVVLEDLNMGFKRGRQKVESSVYQQFEKALIDKLNLLIDKKIDADQPGGLLHAYQLTNKFTSFRDMGRQNGFLFYIPAWNTSKIDPVTGFVDLLHPRYESVEKSRSFFCKFKSIRYNQEKGWYEFTMDYNDFTTKAEGSRTEWTLCTHGTRVETFRNAEKNSSWDNREVNLTDEFNALFATYGIEPQGNLKQAIAEQSQKDFFDKLTHLLALTLQMRNSITGTEVDYMISPVADENGKFFDSRTCGKELPENADANGAYNIARKGLWVARQIQAAHVDEKVNMAISNKEWLSFAQAKPYLED

SEQ ID NO: 219 - protein, 1213 aa, unidentified
  REGION 1..1213: note = Sequence from GenBank assembly GCA_902774585.1
MHNLFQVSKTLRFELKPIGKTKEYFEKYILKQDEVKAETFKKVKKYCDEYHKHFIEECLKDFENEDFKQLLNNYINLYSNNSKNEKEEKEFENIKKELRKMISAQFKKNDLYKGLFGKEIIKNYLKDYYRENDEILNEVSLFDDFTTYFTGYNQNRENMYSEEEKHTAIAYRLIDENLPTYIKNIKAFGIILNEIPDIKKQIQDNLNLDTEKYFTNIENYTHTISQKQIEEYNLAISGKAEENTKIQGINELVNLHNQKNKIRLPKLKELYKQILSDSTSTSFVLDLLQNDKEIIDSINLYYKIFEKEILNKDEFKETLSNINKYNLEQIYINNDLSLTALSKDVYGDWAYIQELLEKEWESNYTGKAKKGTDKYTEAKEKDLKKIKELSIAKIDELIKKYETEDKKIGKIVEHYKNELPKLFKQVNEKYSECKNVLEKNYEENSNELLKDKNAIEKIKDLLDSIKSVQEFVKLLIPRNKALETDSSFYNNLNYNTLTEIIPLYNKVRNYLTKKPFSTEKFKLNFDCPTLLSGWDLNKEEANLGTLFEKDGNYYLGIINKDNRKIFSSYKNNSDNNSYKKIEYKLLPGPNKMLPKVFFSKSRIEEFNPSEELLLKYSKGLHKKGVDFDLDFCHELIEFFKSSIQKHEDWSKFNFNFSKTSTYEDISQFYKEVEYQGYKITYTDISSEYINQLVDEGKLYLFQIYNKDFSKYSKGKPNLHTLYWKTVFDEENLKDVVYKLNGGAEIFYRKKSIGGQVTHPKNQPVDNKNPNNPKKQSIFEYDLIKDKRYSLDKFQFHVPITMNFKAIGENKLNDRIKSEIKKFDDVHIIGIDRGERHLLYITVINSKGEIVEQCSLNKIGIKHETDYHELLDRKEKERDNARKSWGTIENIKELKEGYMSQVVHKIVELMFKYNAIVVLEDLNSGFKNSRKKVEKSVYDKFETMLVNKLEYLVNKDVQGKFEQGGVLNAYQLAKRDIEGRQNGVIFYIPAWCTSKIDPITGFVNLFDTKKINTEFVEKFDNIRFNEKENYFEFDFDYTNISDKSCGKRKSWTICSYGERIRTFRNPHKNSEWDNETVKLTYEFKNLFDRYGIDYKNIKEEIISKSNSQFFNAVKEKDGFYGFGMLFKLLVQLRNSITGDMEDYILSPVKNKQGYFYDSRNCSDKLPKDADANGAYNIARKGLILVQRIKESTKDKIDYSIKNEDWLNFVQEKDK

SEQ ID NO: 220 - protein, 475 aa, unidentified
  REGION 1..475: note = Sequence from GenBank assembly GCA_902775165.1
MSNNVYQYSAVSETELREALQDKKKPLYLFRITNKDLAYAERLEQGKDRKHRGRDNLHTMYFKALMSGEQNVYDIGSGTVFYRPASIARKVTHPAGIPINSKNPNLKDHKNIFEYDLIKDRRFTEDKFQFHLSIIQNYSASGIKSSDYNEKVCQYLRNNPNVNILGIDRGERNLLYISMIDRNGNIVRDENGQLIQYSLNNLTGEYTNASGEIVKFTTPYHTLLDKREKDNADNQRSWGTIGKIKELKAGYMSQVISHITRLMVKYNAIIVMEDLNSRFINSRRKVDKQVYQNFERALIEKLNYLVFKDIPAEESGGLYNALQLADRFTSFRDLQKQSGFIFYIPAWNTSRIDPVTGFVNLLKPKSDNLKQARDFFGKFESICFNSESDWFEFVFDYSNFLSGADYLKSRWTVCTHGDCRYIYDKKMKNNKGGYKKINVTKTIKELFNEYGIDYAEGNDLKEQIVSQNSFFLKTH

SEQ ID NO: 221 - protein, 1245 aa, unidentified
  REGION 1..1245: note = Sequence from GenBank assembly GCA_902775605.1
MKDLKQFIGLYPVSKTLRFELRPVGRTQEWMEKNHVLEHDGKRAEDYPRVKELIDAYHKICISNSLKVSDINWTPLRDAIEKNRQEKSDESKKALEEEQTKMRLEICKKLAKFEHYQELVKADTPSKLINGILPHDKALDTFNKFAVYFEGFQENRRNIYSSEAISTGVAYRLVHDNFPKFLANIEVFENIKEICPEVIQQVATEMAPFLEGVMIEDVFTVSYYNAVLTQNGIDYYNQILGGVAKDDQKYRGINEFINLYRQAHPELATKKKSLTMVPLFKQILSDRETLSDIVRPVESEKQLIEVINNFYQRITNFDINGKNVNVVKELTDLVLSIDTYNPEGIFISAKSITDVSHSLYDHWNRINEKLYDKAVEAIGGVQTVKNKKKVEAYLKKDAYTLSELSFGDDVSISQYFSALTNSTDSINSLWLQFQSWCKSAEKPQFVHNEVGTEYVKMLLDAIMLVLHKCGALLVSLENELDSDFYNKFLPLYAELENVILVYTRVRNFLTKKLSDTGKIKLKFDTPSLGAGWGINKEKTNKAVLLFKDGLSYLGIMNVKGTLDFNCKIEADEPTFKKMVCRNYSKPYMDLPNSFFSQNGISKFHPSERIQKIYFAFKENSKNVDIKKVHELIDYYKDAISRHEDWGSFGFKYSPTESYETINDFYTEVAAQSYKLRFIEVPQKQVDEWVEEGKLYLFQLYNKDYAEGAHGRKNLHTMYWECLFSEENLSNLFIKLGGQAELFYRPQSIKKPVSHKVGTKMLNRRAKDGKPIPDAIYRSLYQYFNGKKAEAELTTEEKAYISQVIVKDVHHEIIKDRRYTKQFFYQFHVPIVFNANAPQRPKINERVLEYIKENPDVNIIGIDRGERHLVYLTLINQRGEILKQKTFNVVGDYNYQEKLKQRENERDQARKSWQSVGKIKDLKEGFLSAVVHEIAKMMIENNAIVVLEDLNWGFKRGRFKVERQVYQKFEKMLIDKLNYLSFKDVDTSDEGGILRGYQLTEPVANYTDIGKQTGFLFYIPAAYTSKIDPATGFVNHFNFNDITNAEKRKEFFMKMERIEMKNGNVEFEFDYRKFKTYQTDFQNVWTVNTSGKRIVFDTEKREHKAVYPTQEFVQAFGNKGITLEEGMDIKAFIGGIEADIKNASFFSSLFYAFKTTLQMRNSNADTREDYILSPVVHDGRQFCSTDEVNKGKDADGNWISKLPVDADANGAYHIALKGLYLLMNPQTKKIENEKWLQFMAEKPYKE

SEQ ID NO: 222 - protein, 1285 aa, unidentified
  REGION 1..1285: note = Sequence from GenBank assembly GCA_902777805.1
MNNLKQFTGLYPVNKTLRFELKPVGKTKENIENKGVLERDSQRAVDYKVVKGFIDEYHKQFIKDRLWSFKLPLFSEGHLDSLEEYKALYEFSKRDETQEAEFSEVKDNLRSIIAKRLTESGSAYERIFKKELIREDLIAFLEKDEEKEIVRQFADFTTYFGGFHENRKNMYSAEEKSTAIAYRLIHQNLPKFMDNMKAFAKIAETSVAEYFADIYEGWKEYLNVGSIEEIFRLDYFSETLTQPHIEVYNYIIGKKILKDGTEIKGINEYVNLYNQQQKDKSKRLPFLVPLYKQILSDREKLSWLTEEFDSDEKMLAAINESYEHLHDLLMGNENESLRSLLIHMKDFNLAQINITNDLSLTDISQHLFSRYDVFTNGIKDKLRIITPRKKKESDEDFEDRISKIFKTQKSFSIDFLDKLPQPVMDDGKPRSVEDYFMSLGAVNTETTQKENLFAQIENAYEDVRPILQMKDTGDSLSQNKPALAKIKSLLDALKDLQHFIKSLLGSGEENEKDELFYGSFQMIWDELDTVTPLYNKVRNWLTRKPYSTEKIKLNFDNAQLLDGWDENKETANASIILCKNGQYYLGIIHKDYRKLLGLPMPSDGDCYDKVVYKFFKDITTMVPKCTTQKKDVVAHFAQSSENYILFDPKTFNAPITITKEVFDLNNVLYNGVKKFQIEYLRSTGDKSGYEHAVSVWKSFCMQFLKAYKSTSIYNLTLVEQQICHYPDLSSFYKAVNLLLYNLSYKKVSVDYIHTLVDEGKLYLFRIWNKDFSEFSKGTPNLHTLYWKMLFDERNLADVVYKLNGQAEVFYRKASIKPENRVVHQANKPIDNKNGLNKKRTSTFEYDIIKDKRYTVDKFQFHVPITINFKATGKNNINPVVQEAIRQGGFSHIIGIDRGERHLLYLSLIDMQGNIVKQMTLNDIVNEYKGQTYKTNYHDLLAKREGERTDARRSWETIETIKELKEGYLSQVVHIISKMMVEYNAIVVLEDLNTGFMRGRQKIERQVYEKFEKMLIEKLNCYIDKHAAPTEDTGLLHPLQLTCDAQKWKRSHQCGCLFYIPAWNTSKIDPVTGFVNLLDTRYDTREKASVFFSKFQRISFNSEKGWFEFVLDYNDFTTKAEGTRTQWTLCTYGERIRTFRNPQKNHQWDDERIMLTEAFKQLFDKYDIDINGNLKEAISAQSDAQFFKDLLSLMKLLLQMRNSITNSEEDYLLSPVSDESGHFFDSREGISCLPIDADANGAYNIARKGLWVIRKIQETPDGEKPSLTITNKEWLQFAQTKPYLKE

SEQ ID NO: 223 - protein, 1204 aa, unidentified
  REGION 1..1204: note = Sequence from GenBank assembly GCA_902778535.1
NSMKDLNQFIGKYKVEKTLRFELAPIGKTEARMESKGVIASDKRRADNYSIVKNLIDRYHKVCIRESLTGCNLNWTQLSEAVETYRRCQDTESRKALLKCQDEYRENIAEKFLSFEDFAELTAPSPSVLIKETLPNNVTSKAHPEFNDIDDVDNAKQALLLFEGFAMYFESYQKNRSNLYTAKNIVSSVAHRIVHDNFSKFLANIKVFENLRVIYPEIIEQCSTELRQHLKGKQLEEVFRVESFNNVLTQEGIDFYNTVIGGISGQEGERKCQGINELVNLSLQKENQGRGKRTALTMVPLFKQILSDRNTYSYIPERINDEEELISVLRAFHAHLASFYFNGREVNVMEELLKIVENIDSFDPNGIFIDAKKLNGVSKRLYDSLFELRARMTSHLEEQQLTKRNIEKFFQKDAFSITELSLDKKHSLVKYFTGLKDVLKTIDQKWKQFETRNNKDGQKKYKDSHTGIEIVRILLDGYKEFFAVCSVLDVESENDLDNNFYGIFTPLLTELRGVIPLYNQVRNFLSQKPSDDKKYLLKFDNSKCSNGWDSPQTKSLLIFRRQDKYLLGVVDNENRLCLNGLSAYTPVSPDDQIEFLDYCQGGHMGQNLLTLVVRDGKTVMVKGHKENGENPELERQLKELLPSDIYRIRKSQSYKNESFNFSKEDLLLFVEYYKQRAKEYYSHFNFTLKDSCDYASFTELVEDIDENAYQIKFVPTSYKNLLRLVNEGKLYLFDIKNKDYGPGVHGKKNLHTLYWEQLFSQENLENLTIKLNAKSILFCRPQVVANPMTHKKGSILLNRKDKNGLPIPEPIYQQLYKHVNGKLAEAKLNDETKGYLGKIVAKEAQYAITKDNRYTKQKYFIHFSTTLNANAPKTADINEVVLNYIKDNPDVNIIGIDRGERNLLYVTLINQRGEILDQKSLNVINDFDYHAKLEQREKERDEARKSWQTVGNITDLKEGYLSAAIHEITTMMIENNAIIVLEDLNRKGFMPKRFKFEKQVYQSFEKKLIEKLNYLCSKDIKPTANGGVLRGYQFTEKFVSFEKMTKQNGILFYVRPDYTSAINPVSGFVSHFNFKDITNTQGRKDFFEKMENIIFKNGHMEFTFDYRKYKPKDKDFKNIWTVCSSGKRILWDRESKEYTDYYPTAAIVEAFANQGIMLQEGMDIKSLLSEIDGSTENAEFYRILFEAFKRTVQLRNSNSVTGED

SEQ ID NO: 224 - protein, 621 aa, unidentified; identical to SEQ ID NO: 213
  REGION 1..621: note = Sequence from GenBank assembly GCA_902778615.1

SEQ ID NO: 225 - protein, 1162 aa, unidentified
  REGION 1..1162: note = Sequence from GenBank assembly GCA_902779195.1
MSSLKQFTKKYSLTRTLRFELIPVEGTTERLVEFNILSVDQKRADDYKKMKETLDAYHRDFIDSCLQNVKLKGLDDFYNLYTPPSITVKEQESYKKSVDKVKAGLRKEIVDYFEKENGKDRVRFKNLTKKELIVKDLKPWIEQHLKPDGEMYFFEEGFKTFTTYFSGYNQNRENMYTDEPKSTAVSYRLVDENLPKFIDNMRVFIKLKDAGLEQALDDFETVLKKRFSIDSLESVFNLDYYNRVLTQSAIDIYNAVIGGWHDGKEGVKGINGYINEYNQRNGGNKLPKMTMLYKQILSDRLSASWLPDAFENCKELIDGIMKYNDEALLTPDGEYLPDVLFELLKGISKYDLNRIYVKNDVSLRSISNELFGYYGVLTEALNYYYEHVIDQDYLTKMSKVKTEKQADSLEKKKNAYVKDTEYFSLHTLQEALDLYIAPLDETSFVKKRYCPNCIAERYYYNVLPYTERIGKSFDELGALIEKKPDKNYQLSDEEKNRIKKYLDNLLDYYHYCRPLILKEDSMLPKDELFYGTFAPLMEQFGSITAFYDKVRNYVTKKPYSSDKIKLNFQCKGGFLQGWVDSYTEKSENGTQHGGYLFRKKNFIGEYDYCLGVTKQTKCFRCRTAIEERDLSSYERLDYYNPNSKSIYGSSYRGERSYNENKRLAKNAIVRFLASNSDNDIAVRLKNEMLDDEAITPSGCLSSIRKSSEDLYLRLLEDEEFCEINNTIIDNLKSTMRASVRIPGSDIIANKEYIVFTSIIADIDSLMANRVFNYIPVSQAEMNAVLNDDSKPMFLFKISNKDLAYPERVEQGVRKRQKGHDNLHTMYFKALMSGSQEVYDLGTGEVFFRQASIKRKVTHPRGEAIECKNPNSKKEYSTFDYDLIKDRRYTEDKFFLHLSIVQNFKQTQKVKDVQFNEEVCKFLKNNQDINIIGIDRGERNLLYISMIDRDGRIVRDKKGNLIQYSLNDIIGEYKNFNGETIKFKTPYNDLLNQREEADKDARKNWKTIDSIKELKAGYMSQVISHITHLMVEYNAIVVLEDLNSRFINSRKKVEKQVYQNFEKALLEKMNYLVFKDVPAEAPGGVMNALQLATPFKTFKDLKKQSGFIFYVPAWNTSRIDPVTGFMDLLRPKCEQISEWQSFYDKFDFIRYNPQEHDMCSTGR

SEQ ID NO: 226 - protein, 1262 aa, Fibrobacter succinogenes
MNLNTYFSQFTGLYPVSKTLRFELKPMGKTLEKIKETGIIENDKKRHNDYFDAKKIIDKYHKYFIDAALSKFPCIDWNPLKEAIERSLDRSDASKKKLEKTQTEFRKKIAKALTTHGHYKELTASTPKDLFLKVFPDHFGKQPAIDTFDGFSSYFTGFQENRQNIYSDEAISTAIPYRLVHDNFPKFLSNIEVYNILKDNAPSVLSDAENELKDFLNGKPLANIFELNAYNDVLTQSGIDFFNQVIGGFSGEGGEKKTRGINEFSNLYRQQHPEFAQKRLATKMIPLYKQILSDRETKSFILESYSTDSQVQESVKEFFESQILNCDIAGRKVNVLKELSSLIKRITEFDLGSIYVNQEELSSISLELFKSWNTINAILFKNAENRIGSAEKAANKKKIDAWMKSNEFSIATLNLAIAESDSEEISRVKIESYWNNFEAKVQSILCGDNRRNLDEFISATFNENNALREDSKVIEKLKAFLDALIEIMHSIKPLISDAENRDLSFYNELMPLYDQLSLVVPLYNKIRNYATQKLTESEKFKLNFDNPTLADGWDQNKEEANTAILLLKNGLYYLGIMNAKNKPKIKDFKTSESEDCYDKMVYKLLPGPNKMLPKVFFSEKGLATFKPPKDILDGYNAGKHKKGDLFDIGFCHQLIDFFKESIAKHPDWKKFDFKFSDTSSYEDISGFYKEVTDQGYKITFSKIPTPQIDEWVNEGKLFLFQIYNKDFAPGAKGSPNLHTLYWKSVFSPENLKDVVVKLNGEAELFYRPSSVKKPYSHKVGEKLVNRIGKDGLPLPESVFGELFRYFNGKLDGELSDEAKRYLDVAVVKDVKHEIVKDRRYTQDKFEFHVPLTLNFKADSKNEYMNERVRHFLKDNPDVNIIGIDRGERHLLYMTLINQKGEILKQKSFNIVESVNYQAKLVQREKERDTARRSWSSVGKIKDLKEGFLSQVIHEITTTMIENNAIVVLEDLNFGFKRGRFCVERQVYQKFEKMLIDKLNYLVFKNKPEGDVGGVLKGYQLAEKFDSFQKLGKQSGFLFYIPAAYTSKIDPTTGFANLFNMTELTSAEKKKEFLSHFEDITYDGKNDRFLFSFDYKKFKCFQTDYIKKWTVYSQGKRIVYDKESKSAKAISPVEIIKAALAKQNIALTDQLDVLSAINSVEASRETASFFGDICYAFEKTLQMRNSIPNTDEDYLVSPVMNKKGEFYDSRSCGDSLPKNADANGAYHIALKGLYLIKNVFDAGGKDLKISHEDWFKFAQSRNR

SEQ ID NO: 227 - protein, 796 aa, unidentified
  REGION 1..796: note = Sequence from GenBank assembly GCA_902780215.1
MEQALSILLYNDDTPWFKWYDLIRNYLTKKPQDDAKENKLKLNFDNSSLLGGWSDGQEKKKAATLLKYGNELYLCILKVKNIFDTSKEDNPIYKTAHSNASRLILRNLKFQTLAGKGFLGENGISYGEMGKDDPIKAIHCLQKIIKERYVSKYPLLDKFTTNTYTDKSKFDAEISETLKECYVCEFVPIDWNLVTEKQNNAELFLFKIHSKDYMSKADGKKDLQTLYWEDVLSNGSKHQLCAGAEIFMREPVAKESPIKHTIGSKLVNKRDKDGNTIPEHLYREIFMYVNGKSKNISEEAKKYIDEQIAVIKDVKHEIIKDKRFYGEPKYLFHCPIKLHYEAKAPKYAFSEVNEKITNALQQSDNLQFIGIDRGEKHLVYSCTIDKAGKIIKCHHHDNINGTDYVQKLEAVADERVIAKKNWQTQNKIKNLKSGYISHVVHRLVEETIIDDDKIAPHAYIVLEDLSTEMKRGRQKFEKQVYQNLETALAKKLNFVVDKNAKQGELGSVSKALQLTPPINNYQDIEGKKQFGVMLYTRANYTSVTDPATGWRKTIYIKNGKEEDIKNQILDKFNDFGFDGKDYYFEYTEKHAVHTWRMYSGKNGEPLPRFQNRKQIQQDKNIWAPEQVNVREILDNLFACFDKTKSFKEQIKQGIELKKIDGRSETAWQSLRYALELIQQIRNSGEKDSKDDNFLYSPVRNNNGEHFDTRNYRDNGELSEIKDADANGAYNIARKGLIMDAHTKYWREHGKPTKKNEKTSDLDLFISDEEWDLWLLDREKWLKKLPIFSSRSAKEDR

SEQ ID NO: 228 - protein, 1179 aa, unidentified
  REGION 1..1179: note = Sequence from GenBank assembly GCA_902784335.1
MEQLTNLFQVHKTVKFELRPEGKTKDLINSDGFLVFDDKERAMAYQVVKCLIDDYYQKEVIAPLLEKIKDNKEWKRLLVAYDDATDSDTRRTISQNLAIIIMKAKPNGLSANSLHTKLDDYLQKQEIRDLHRILKELQYDEISINNKSLKAVWNDGLHDFVQDAIDKFEGFTLYFGPLVVNMRQLFSGKKNGIPHRIIYQNLYTFIRNKRTHDDLRGRIKEFKDEKEIAITDYSNCLLQDGIDKYNKYIGQLVQRLKEYGDSHPESAKWYKIFKQLNKQILSPRIAPDWLPVAFTNDEMMIVAILSFMKNVNPQLSDLKKIISQVDTYKGHIFIYRKSLRSIAVQMTGDYKGLDDAFDIPRGFSQSESLSLQWMSSEVKNEYLNFLKDNLFTTLDSIQKRGKEAEMFLDLKEAEKNDYRRNNHASVSIKRLMDAYKQLYLLLRPLTGTGDEEDRNEDFYGDFMPIMDLLQPINMLFDSVRNWLTKSAFSNDSYPVYLGLATILKNWSNKTSYLKKDGKYYFLMLNGTDYTRLQSKNITNTSAILYRFYTQPANRIDANLTRQFVFSKKADVTKGREEPTMAKFVREHMEDLYEDWTRVKSEKYKSPNNKEDLAHAINYFQKCLRMHPDYKDFDFDFRPATEYDDYISFVESLKSKLFRIEERTICWDSLLQLVDDGKVLLFQLYNKDYANNSPSNSTRNLHTLYWETVFSEQNQISYNFKLEEPKLYFREKADVVQRTGDIHSVPLRYQKSKMHLHIPILMNANAQNTVDINQLVLERIQAGAFSHIIGIDRGERNLLYYSVLDLNGNIEKQDSLNVINDVDYHKLLMEKEADLDDEQKNWKARSGIRNLKKGYLSHAIHQLTKLIRKYNAILAIEDLSEGFKRGRQKIDMQVYQLFEKMLIEKLSFMVDKKVSDDNRSGSTFHALQLAIPELKQPETGIKQNGILFFVPPEYTSAIDPVTGFCNLFDRERIKDIGRVFKDFKRISYNADKDWFEFEWDYQDVMRYTRLEQCTNSQPWVACSIGERIEWMGSKRYRNLKCECIALTAEFKALFEKYKIQYKNGMDLKDTLSSINKKEDINKLKCLFFLTISLRNKPDEDTDYILSPVRSAYGTFFDSRRVNPDISPKLPENGDANGAYNIGRKGLISINKLKNGIKESLSLNEWVQSVRTEPFQNANVT

SEQ ID NO: 229 - protein, 847 aa, unidentified
  REGION 1..847: note = Sequence from GenBank assembly GCA_902785195.1
MEQALSNLLYSDEAQWFKWYDLIRNYLTKKPQDDAKGNKLKLNFDSSSFLKESGWDNDYLKHGAFIVIKGNDYYLVVVNDKLEEDDINQLKTSSNNTAKRLVYKQQKMDFKNFPRWFIFSKGDNLAPAVEKYKLPIETILKDYKKYRELSQKGKESFIEEHPKFRSNLIAYFKKCALVHESLMPFKDMLEMVWRKTDEYKTLSDFYNDTINACYEITFEDIDFDKLRSMDKFYIFQIYNKDFSTGQNGGNGTTGKPNMHTIYWKMLFDEINLKNVVFKLDGQGAEIFMRKPIGKESLVKHGLGFKLVNKRDKEGNTIPEQIYREIYMYVNDKKEVISVEAQKYIDEQKVIIKDVKHEIIKDKRFFGETKYLFHCPITINFKAKSANEPEVNSKILNVLHQLDNLHFIGIDRGEKHLVYSCTIDKDGKIIKCNHHDNINGTDYVQKLEAVADERIIAKKNWQEQNKIKDLKSGYISHVVHRLVEETIKDDGKIAPHAYIVLEDLNTEMKRGRQKIEKQVYQNLETALAKKLNFVVDKNAKQGELGSVSKALQLTPPISNYQDIENKKQFGVMLYTRANYTSVTDPATGWRKTIYVKNGKEEDVKKQILEKFDDFGFDGKDYYFEYTEAHVGRTWRLYSGKNGEPLPRFQHRKQLLQEKNIWVPESINVVEILDKLFVDFDKLKSFKLQIKKGVELKKIEGKSETAWQSLRYALDLIQQIRNSGEKNSIDDNFLYSPVRNINGEHFDTRNHEGNGDLSKIVDADANGAYNIARKGLIMDAHIKHWIESGSPAKKGEKSPDLDLFISDKEWDLWLLNRDLWKKELPVFASRNAKEDAVKSNTGIRRAKKK

SEQ ID NO: 230 - protein, 1229 aa, unidentified
  REGION 1..1229: note = Sequence from GenBank assembly GCA_902786255.1
EQFINRYPLSKTLRFSLIPVGKTEENFNSKLLLEEDEKRAEEYVKVKGYIDEYHKVFIDRVLSGVVLENIADYADYYYKNEKTDGDKEQMTKLEEKMRKQIATALTKDSEYNSLKGQDLIKKILPGFLKSEKERASVEMFANFTTYFRGFQTNRENMYSELAQSTAISYRCVNENLPKFLDNAKSFSKVKELLPEGNLKALEENFFALFGIHFLDVFKADYFSFVLAQSGIDKYNGILGGYTCSDGTKIQGLNEYINLYNQQIAKSEKSKKLPLMKQLYKQILSDRESVSFIPEQYKTDDEVISSVNDFYHTTVEQTVREFAGLFRRFSDFDSNGIFIKSGLPVTDISNAVFGVWSAVSSAWENEYEAAKPIKKGADAEKYHEAEKKAYNKIASFSISELQRLGEQNTAEKAEGNVVTYYAHSVPEAVEAVTCAYNSAEKLFTTVYSESHEKKLCSDTEAIEQIKNLLDSVKDLERLVKPLVGTGKEENKDELFYGEFLPLFDALSQVDRLYDKVRNYVTKKPYSKDKIKLNFGNPQLLGGWDKNKERDYRTILLRKNGYYYLAIMNKEHSKVFVDAPEATNGSVYEKMEYKLLPGPNKMLPKVFFATSNIETFMPDKEILEIRKKESFKKGAAFNIGDCRKFIDFFKSSIEKHPDWSQFGFNFTPTEQYGDISEFYREVSDQGYSIRFKPIPESYINEMIDCGYLYLFQIYNKDFSEYSKGTPNLHTLYFKMLFDERNLSDVVFKLNGEAEMFYRKASISEKEKIVHPANKAIKNKNPDNAKTESNFDYDIVKDRRFTKRQFSLHVPITINFKAHGQENLNNDVRLQLKNKDDIYVIGIDRGERNLIYISVVDGNGNIVKQKSLNEIIGDNDYRTDYHKLLDLKEKERDAARKSWGTIEGIKELKEGYISQVVHEICRLVLNYDAVIAMEDLNFGFKKGRFSVEKQVYQKFENMLISKLNFLCDKKADPENEGGLLKAYQLTNKFDGVNRGKQNGIIFYVPAWDTSKIDPATGFANLLKPKYSSVSETKHLIENIDDIRYNSETDMFEFDIDYSKFPRCNADYKKRWTVCTNGDRIETFRNPQKNSEWDNRRVELTAEFKALFADYGVDINMCIKKSVLNISDKGFFVRFIKLFALTLQMRNSVTGSTAPEDDYLISPVCDATGVFYDSRNYHGENASMPADADANGAYNIARKGLWAINQIKNSPADKLDNVKLAVSNAEWLEFAQK

SEQ ID NO: 231 - protein, 1257 aa, Fibrobacter succinogenes
MNQNTSFSQFIGLYPVSKTLRFELKPIGKTLENVQNKGIIEQDEAKSLKYVEAKQIIDQYHKYFIGEALEGVNLDWNPLQKAFEDYLTNRNAPAKKNLEKTQESFRKEIAKKLSEHKHFKELTAATPKELFEKILPEHNGKQEAIEAFAKFSTYFKGFQENRENIYSSDAISTGVPFRIVHDNFPKFLSSIQVFQNIKENCPCVLDDAEKELQELLKSQKLIDVFNINYFNNVISQDGIDFFNQVIGGYTTPNGTKVRGINEFANLYRQQNPEFAKKHIATKMIPLYKQILSDRESMSFVLESFNKDTDVQDGVKEFFEHHLLRCNMDGNEINVLEKIGELILGLKNYDSLNKFFVSRDSLSSISQKLFDNWNTLNNYLFNYWENKIGSVEKASNKKRIDAKLKEDYFSIEELNEVLKFNESDANICDFWTDYTSQANSVLSGEIKKNYEEFLAADYSNKALRENEADVQKLKDFLDAIVNILHLVKPLMMDSDQGEPSFYNELNPLYDQLSSIIPLYNKTRNYITQKISDSTKKFKLNFENPTLADGWDQNKEEANTSIILKKNEKFYLGIMNAKDKPKIGLYKVKPEEPHYDKMVYKLLPGPNKMLPKVFFSAKGKEIYKPSKEIQDGYAAGKHKKGDSFDKQFCHHLIDFFKEGISNHPDWKNFNFKFSETSSYEDISAFYNEVSDQGYKLSFFPIPDSQIDAWVNEGKLFLFQIYNKDFAPGAKGKPNLHTLYWKATFSLENLKDIVFKLNGEAELFYRRSSIKKPYSHKIGEKMVNRITKDGRPIPDAIFGELFRYFNNSSKTSLSDEAKKYLDFVTVKDVKHEIIKDKRYTEDKFEFHVPITINFKADDGSRYINDQVKDFLKNNSDVNIIGIDRGERNLIYMTLINQKGEILAQKSFNLVGNTNYHEKLSIREQERDAARRSWQSIGKIKELKEGYLSLVIHEIAKTMIENNAIIVLEDLNFGFKRGRFCVEKQVYQKFEKMLIDKLNYLVFKDCADSEYGGILKGYQLTQKFTSFKDIGKQNGFLFYVPAAYTSKIDPTTGFVNLFNFRDLTNAEKKKDFLTTLDDITFNSETNSFAFTFDYSKFKVFQTDYQKIWTVFTNGERIVYDRESKKHNIIEPTTIIQEALEKQGIQCVDQLNVLAEIEKIEPTRENARLFDSICYAFEKTLQMRNSNSETGDDYILSPVKNKNGVFFNSNEAGDKLPKDADANGAFHIALKGLFLLQHISETDEKLKIPHEKWFEFVQSRNK

SEQ ID NO: 232 - protein, 1261 aa, unidentified
  REGION 1..1261: note = Sequence from GenBank assembly GCA_902786865.1
MKQFTNLYQLSKTLRFELKPIGKTKENIEKNGILERDNQRDIAYKAVKKVIDEYHKAFIEMMLNDFELQYELLEEYHHLYHISNSEEPKKKEKLQKIQENLRKQISDRFTKSEQYKRLFGKELIKEDLSEFVKTPQFGNYIRAQKGDEYTDEQVRQIQERTLEDIDQFKDFTTYFSGFHQNRQNMYVADDKATSIAHRMIDENLPKFIDNMKTFAEIAESDVAEHFADLYKEMESYLNVSDIREMFQLDYFSMVLTQKQIDVYNAIIGGKTLADGTKIQGLNEYVNLYNQQQKKKEDRLPKLKPLFKQILSERNAISWLPEEFKDDNEMLQSIGKCYQDLNTLVFGKLKTLLETLNDFDLDNIYLPNDLQLTDIAQKHYGSWAVINKAIEEDLKTVNPQKKRESGEKYEERIAKLLKANDSYSIGYINSLLKDRMEDFKPLEAYFSNIGAEDDGKQQKLSHFARIENAYTEAKSLLTAEYPDDKKLSQDKANVEKIKNLLDAIKDLQRFVKPLLGCGTESDKDSHFYGEFTPLWEQLDQITPLYNMVRNRMTQKAYSVEKIKINFDNSTLLAGWDLNKEADNTCTLLRKDGLYYLVIMDKSNSRVLKAENLLSDGDCYEKMEYKLLPGANKMLPKVFFSKSRIGEFQPSESVLENYKNETHKKGDNFNIDHCHELINFFKKSIGKHEDWSKFGFKFSDTRTYQDLSGFYREVEQQGYKITFRNVSVDYINQLVDEGKIYLFQIYNKDFSPYSKGTPNMHTLYWKMLFDERNLADVVYKLNGEAEVFFRKKSVKVERPTHPANQPIANKNAQNNKKESTFAYDLIKDRRYTVDKFQFHVPITMNFKAAGLNNINPLVNEYLKMSNTTHIIGIDRGERHLLYLSLIDLKGNIVEQYSLNEIGNIYPTNYRDLLNAKEKQRDEARRSWQTIENIKELKEGYMSQVVHKIAQLMLKYNAIVVLEDLNFGFMRGRQKVEKNVYQKFEKMLIDKLNYLVDKKLDADAMGGVLNAYQLTNTYKVFHDQYKKQQNTIGKQCGFLFYIPAWNTSKMDPTTGFVNLLDTRYENMEKAKAFFGKFDSIRYDALKDWFEFAFDYNNFHNKAEGTRTQWTLCTYGTRIETKRDAAQNNNFVSTEVDLTQKFKALFAEKQINPSGNLKEQICNQTDASFFKSLLNLLRLTLQMRNSITGTETDYLISPVQNANGEFYDSRKCDANLPENADANGAYNIARKGLWVIEQMKQADDLSNIKLAISNKEWLRSAQKLE

SEQ ID NO: 233 - protein, 1246 aa, unidentified
  REGION 1..1246: note = Sequence from GenBank assembly GCA_902787735.1
MIDLKQFIGTYPVSKTLRFELKPIGRTQEWMEKNHVLENDGERAEHYPRVKELIDSYHKKCINESLKKVQLDWNPLRDVVENYRHNKSDEAKKALVEEQNKMRNEICKKLSEFEHYKELVKADTPSKLINDILPHEESLDAFDKFAVYFEGFQENRRNIYSNKAISTSVAYRLVHDNFPKFLANLEVFENIKAICPEVIQKVSSEMASFLNGIKIKDVFTIEYYNSVLTQDGIDFFNQILGGVAKDGDKYQGINELTNQFIQLHPDIGIRKKSLTMIPLFKQILSDRETLSDIAKPIESEEQLVEMLNHFYHHITNITINGNTVNVINELTRVVLNLDKYNQERLFVSAKALNDVSRFMYGKGNRLNEKLYDKAVRTSGGIQTANNRKKVDAYMNKGAFSFSELSFDDDVSVMQYFKNITDTSDTIDGLWRELFDWCNSSEKPQFMNNEKGTGLLKDLLDALMVFLHKCSALVVSLDNDLDNNFYNNFLPLYAELEKVILVHTRVRNYLTQKISDTGKIKLKFDTPSLGGGWGINKEHAYKTILLFKDGLSYLGIMNVKGTLDFNCTVEVGEPTYQKMVIINHSKPYLDLPNSFFRQSGINKFHPSERTLKIYKAFREDSKSVGIKEVRELIDYYKDAITRNEDWNAIDYRFSPTESYENINDFYTEVAEQSYKLSFIDVLAKQVDEWVETGKLYLFQLYNKDYAPGAHGRKNLHTLYWESIFTKENLNNCFIKLGGKTELFYRPQSIKVPVVHKIGSKMLNRRDKNGMPIPDSIYRNLFQYFNGKKNEAELTHEEKNYIDKVIVKDVTHEIIKDRRYTKQYFYQFHIPIVFNANAKGNVKLNERVIEYIQSNPDVNIIGIDRGERHLIYLTLINQRGEILKQKTFNIVGNYNYQAKLVQREKERDEARKSWQSIGKITDLKEGFMSAVVHEIAKMMVEYNAIVVLEDLNRGFKRGRFKVERQVYQKFEKMLIDKLNYLSFKDRDANEEGGILRGYQLTEKVVNYTDIGRQTGFLFYIPAAYTSKIDPVTGFVNLFDFNDLTNAEKCRSFLLAMKRIEMKNGNVEFEFDYRKFKTHQTDYQNEWTVNTFGKRIVYDKEKKETKDVYPTQEIIKAFANKGIVLEEGMDLKAFLYGIDADAKSASFFYAIVNAFKMTLQMRNSNSVTGEDYILSPVIDIHNGKQFCTNDVKKEKDNDGDWVANLPIDADANGAYHIALKGLYILINPQIKKIENEKWFKFMVEKPYLR

SEQ ID NO: 234 - protein, 1232 aa, unidentified
  REGION 1..1232: note = Sequence from GenBank assembly GCA_902787825.1
MENKTINSFINRYQISKTLRFNLKPVGETQTNFTKRGLLEEDEQRAQDYKKVKLIIDDCHKSFIDKVLSNPKIVDVKDYADLYYKSTKNDKEIKEMKDTEARLRKQVSSALTKNSLFGKLFKKELFTDILPEFIKSYEDYEEKIKLLDSFNGFVTYFSGFFKNRRNMYSEEEKSTAIAYRCINENLPKFLDNCKVFEKISDKLPKEKLEELNENISEICGVDLQDMFEIDYFGFVMSQKGIDLYNQAIGGYSNSDKTKTQGINEIINLYNQTNKEDRLPKLKPLYKQILSEKETLSFIPESFNDDNEVINAVNMGYNMIADCMKEQELNEHISELDTYDLSGIYVKSECVSSISQQLTKDWSAITEQWNKEYDSTKINPAKPPKDMEKYNNDRKNAFKKKNFSLSELQVLISRINNSLSIVDYYKDLLSDLISLIHENYEAAKQLLTNAYNCSKKLSHNENAIEKIKALLDSIKNLEAVIKQFMVTDAQANKDERFYGDIQPVYDKLRDFDRLYDKVRNYITKKPYTNDKIKLNFHNPQFLNGWDRNKERDYHSVLLKNGDNYYLAIMDKSDSKAFEKFPAENSNGWIKINYKLLPGPNKMLPKVFFAKSNIEHFAPSDEIIRIRDEETFKKGDRFNKLDCEKLIDFYKKSLSKHEEWREYGFVFKDTKDYNDIGEFYNDVRKQGYKLTYENINEEYLMDKVKQGRVYLFQIYNKDFSEYSKGTPNMHTLYFKMLFDERNLKDVVYQLNGGAEMFYRFPSLKIEETTVHKAGEAIRNKNKLSGKESSTFNYDIIKNKRYTKPQFSLHVPITLNFKSQGKEQSNLDVRKALKNSTDNYVIGIDRGERHLLYICVIDSSGKIVEQYSLNSIINEYNGKQYETNYHDMLDKKEAERDKARKNWTTIESIKELKEGYISQAVHKICELVVKYDAVIAMEDLNFGFKKGRFKVEKQVYQKFEKMLIDKLNYLVINKNADPEQNGGLLKAYQLTEKFTSFKKMGKQNGYIFYVPAWLTSKIDPVTGFVDLLRPKYTSVDSTKDMISKFDFVRFNAAEDLFEIGIDYAKIDGGKTSYRSKWTVCTNGERIRSFRNKDKNSEWDSETIRLTDSFKTLFDKYSIAYPDGEDIREKLTEQTSTDFFKSFIKLLSLTLQMRNSKSNSDIDYLISPVRDKNGNFYRSGEKSELPANADANGAYNIAKKALWCIEQIKATDDDELKNVKLAISNKQWLEYVQKRG

SEQ ID NO: 235 - protein, 881 aa, unidentified
  REGION 1..881: note = Sequence from GenBank assembly GCA_902788275.1
MLLCYDIERNTKAFLDSSDSIVAIEKFKDKKQFVGEEDQTIKQVKDWLDAATDAMRIVRYFAVRKSKMKGNLPNVTMEQALSNLLHNEDAQWFKWYDLIRNYLTKKPQDDAKENKLKLNFGTSSLLGGWSDGQEKTKAATLLRNNNALYLCILKTKNVFDTSKDNNPIYNVSQSNASRLILRNLKFQTLAGKGFLGEYGISYGEMGKNDSTKAISCLQKIIKTRYVDKYPLLEKFVTNTYTDKREFDAEILETLKECYVCEFKPIDWTFVIEKQNAGELFLFKISSKDYLPNAKGRKDLQTMYWEDVLSDGSKHQLCAGAEIFMREPVAKESPVMHRIGSKLVNRRDKDGNTIPEHIYREIYSYVNGKMSVVSAKAQKYIDDKRVIVKDVKHEIVKDKRFYGETKYMFHCPIKLYFEAKDPKYAFSEVNKTITDSLQQSPNLQFIGIDRGEKHLVYSCTVDTNCKIIRCNHHDFINGTDYVQKLDAVANDRIIAKKNWQAQSKIKDLKSGYISHVVHRLVDETIKDGNVIAPHAYIVLEDLNTEMKRGRQKIEKQVYQNLEVALAKKLNFVVDKNAKHGELGSVSMALQLTPPINNYQDIEGKKQFGVMLYTRANYTSVTDPATGWRKTIYIKNGKEEDIRKQILEAFRDFGFDGRDYYFEYTEANVGHTWRMYSGNNGKPLPRFRNRKQIFQDKNVWVSEQINVVEILDRLFVKFDKKKSFKEQIEQGKELEKVEWRDESAWQSFRFALDLIQQIRNSGTEDNDDNFLYAPVRNDHGEHFDTRNHKNNGELSEIRDADANGAYNIARKGLIMDAHIKRWIEIGCPTVSEDKAPDLDLFISDLEWDLWLLDRERWEKELPIFASRSAKKKEDKQQTRGKKQ

SEQ ID NO: 236 - protein, 1177 aa, unidentified
  REGION 1..1177: note = Sequence from GenBank assembly GCA_902788315.1
MEHLTNLFQVHKTVKFELRTIGKTEDLINKNGFLLSDDKERAMAYQVVKCLIDDYYQKEVIAPLLEKVKDNEDWNHNLVAYGDASDSNTRRAISQKLAAIIIKAKPNEPSANLLYTQLHNYLQKLNTGDLCRILKDLQYDEIAIKDRTLKAAWNYKLKDFVQDAIDKFNGFTLYFSALAVNMKQLFSRKKNGLAHRIIYQNLYTFVRNKRALDDLRVVIAEFRDEKDIAVTDFSNYLLQDGIDKYNKYIGQLIQRLKEYEDSHPNSSRWHRRFKQLNKQILSPRIAPDWLPAAFTNDEMMVVAIGAFMKSVNPQLSALKLIIDQIDTYNGHIFIYRKSLRSIAVQMTGDYKGLDDVFVIPKGYSKSESLSLQWTTPEVKQEFFGFLKDNLSAKLLSIQQASCEADEFLNLKKAEGNDYRRNNKASVSLNKLMNAYKQLYQLLRPLTGTGEEEERDEEFYGSFMPIVDALQPINELFDSVRNWLTKKAYSNESYPTYLGVATILKNWSSKAVYLKKDRKYYFCLASTKGEEKRDIHDILKKIWISNNCPKDAVIYLTRTQSPERITANLPRIFIRSKEADKVNSFVEKHPELKTEWEKLKGGGYKSPELKNEAISYFQKCLQLHDDYKYYKYHFRPAKEYDDYDSFVNSLKKEALSFFEEKPICWNELLQLVDDGKVYLFQLYNKDYADNRPGNSSPNLHTLYWEAVFSQQNRLSYDFKLEEPKLYFREKADVVQRTGDIHSVPLRYQNPKMHLHIPILMNANAQNTVDVNQLVLEQIQAGTFSHIIGIDRGERNLLYYSVLNMNGSIVEQESLNVINDVDYHKLLMEKEADLDDEQRNWKARSGIRKLKEGYLSHALHQLTNLIRKYNAILVVEDLDKAFKHSRQKIDMQIYQLFEKMLIEKLGFWVDKKVSDGNHAGSTFCALQLATPGLKQEEKGVRQNGILFFVPPEYTSAIDPVTGFCNLFDREHVKDVRRIFAHFKRVSYNVDKDWFEFEWDYQDVLQYTRLKECATPQPWVVCSMGERIEWTGSERYRNQKCESVDLTTEFKTLFEKYNIQYVNGEDLKDAIASINKKEDINELKRLFFLTVSLRNKPNKDTDYILSPVCDANGVFFDSRLVNSEALAKLPVDGDANGAYNIGRKGLLSINKLKNGINEPLSLEEWVKSVRLEICQTTNQT

SEQ ID NO: 237 - protein, 793 aa, unidentified
  REGION 1..793: note = Sequence from GenBank assembly GCA_902789995.1
MEQALSNLLYNDDAQWFKWYDLVRNYLTKKPQDDVKENKLKLNFDNPILLGGWSDGQEKVKSATLLKYMNEMYLCILKTRNIFDTSKENPIYIEHSDASRLILRNLKFQTLAGKGFKGENGITYGEMGKSDPQKAIQCLQKIIAERYVSKYPLLEEYVSNAYTDKSKFDAAITETLKQCYVCEFEPIDWNLVVEKQNNGELFLFKIHCKDYMPKVSGKKDLQTLYWEDVLSEGSKHQLCAGAEIFMRKPVAKAPRKKHSVGSKLVNKKDSDGNTIPERIYSEIYLYVNGKTESISAEAQRYIDEQKAVIKDVKHEIIKDKRFYGETKFMFHCPVKLNYESKGYKGPNYAYPEVNAAIRESLQQSDNLQFIGIDRGEKHLVYSCTLDKDCNIIACHDHDNINGTDYVQKLEDVANERIIAKKNWQAEDKIKDLKSGYISHVVHRLVEEVIKDGNTIEPHAFIVLEDLNTEMKRGRQKIEKQVYQNLETALAKKLNFVVDKDAQPNELGSVGKALQLTPPISNYQDIEGKKQFGVMLYTRANYTSVTDPATGWRKTIYLKNGKEEEIKKQVLEKFSDLGFDGRDYFFEYTEAHAGHTWRLYSGKDGQPLPRFQNKKQLQQDKNIWVPEQVNVVEILDNLFAHFDKTKSFKQQIEQGVELVKIERRKETAWQSLRYALDLIQQIRNTGTEQEDDNFLYSPVRNSKGEHFDTRNHANNGKLSAIKDADANGAYNIARKGLIMDAHIKYWMACGQPSKKNTLDLFVSDKEWDLWLLDRKGWEQELPAFALRNANESKD

SEQ ID NO: 238 - protein, 616 aa, unidentified
  REGION 1..616: note = Sequence from GenBank assembly GCA_902791265.1
MRTGASSDSGSPTPRNTTASTSSTTRSAHRVNKMTFAPIPVQTVSDLIRDNKILLFQIYNKDFAPGSTGRPNKFTLYWKTLFEEENLKDVVFKLNGEAELFLRDPSVRKPFVHRKGDKLVNRTTKDGAPVPESVHAELCKFANGRIGYDELSAEARGIWDNGQAVVKTATHDITKDRRFTMPKFLFHVPISINFKAPDAKAGINQKVLDYLRDNPGVKVIGIDRGERNLVYLSLIGRNGRILLQKSFNTVPQRRSDRTVEFDYHAKLDQREKERDAARKNWTSVNRIKDLKAGYLSQIVHEIAKLMVEHNAVVVMEDLNFGFKRGRFAIEKQVYQNFERALITKLNYLVFKDAETPADAGYVLKGLQLANKFESFEKLGKQSGFLFYVPAGYTSKIDPATGFVSLFQFNKYTSAEARKVFLGKFRSICFDAARDAFAFTFDYRDFPAQGKELPGKSEWTVRSVGERIVYSPRKRESFVCKPTSIILETLAKRGIRPEDGFDLLQLIRETEGADRANAAFFNAVFEAFKLTVQMRNSDAKTGEDYILSPVMSTDGVFFDSRKAPADMPRDADANGAYHIAMKGLYLLQNRFTAGTKKADLKISNQEWFDFIQNRHAR

SEQ ID NO: 239 - protein, 1246 aa, unidentified
  REGION 1..1246: note = Sequence from GenBank assembly GCA_902791725.1
MKQFTNLYPVSKTLRFELQPVGKTKENIEKNGILLRDEQRAEDYKRVKLLIDEYHKQFIKQRLWNFKLPMINNGHHDSLEEYQALYELSKRDDDQEATFTEVKDNLRSIIAKQLTVGSTYERIFKKELVREDLIEFLEDEKDKEIVRQFADFTTYFSGFHENRKNMYSAEEKSTAIAYRLIHQNLPKFMDNMKAFAKIKQTSVAEHFTDIYEGWKEYLNVESLEEIFSLDYFSETLTQPHIEVYNYIIGKKILDDGTEIKGINEYVNLYNQQQKDKSQRLPFLVPLYKQILSDREKLSWLSEEFDSDEKMLAAIKESYNQLHDLLMGEENESLRSLLSHIKDYDLTQINITNDLSLTEISQHLFGHYDVFSNGIKDQLRIITPRKKKESDENFEDRISKIFKTQKSFSIDFLDKLPQPIMEDGKPRCIEDYFMALGAINTNTTQKENLFAQIENAYEDARAILQMKETGDTLSQNKSAVAKIKALLDTLKDLQHFIKPLLGSGEEQEKDELFYGSFQMMWDELDAITPLYNKVRNWLTRKPFSTEKIKLNFDNAQLLAGWDLNKEIDNTCTILRKDGLYFLAIINKQHNRVLTTDNLISDGDCYEKMVYKQLGQISQQLPRIAFSNSWQQKITIPADVMRIKKTGSFKTNNDDLQKLIAFYKYFISQHKEWNSFFNIRFTERDNYKNLPDFYSEVDTLFYSLSFLKVSVDYINQLVDEGKLYLFRIWNKDFSEFSKGTPNLHTLYWKMLFDERNLADVVYKLNGQAEVFYRKVSIKPENRIVHQAHRPITNKNELNEKRTSTFEYDIIKDRRYTVDKFQFHVPITINFKAKGQNNINPIVQETIRQDGFKHIIGIDRGERHLLYLSLIDLNGNIVKQMTLNDIINEYKGQTYKTNYHHLLAKREGERTDARRSWDTIETIKELKEGYLSQVIHIISKMMVEYSAIVVLEDLNIGFMRGRQKIERQVYEKFEKMLIDKLNCFIDKQIAPQEVGGMLHPIQLTNKFESFGKLGKQSGCLFYIPAWNTSKIDPVTGFVNLFDTHYETREKARLFFSKFQRINFNEEKGWFEFAFDYNDFTTKAEGTRTQWTLCTYGERIRTFRNPDNNHQWDDERIELTEEFKQLFEKYDINIRGNLKEAISNQSDAQFYRDLLGLMKLLLQMRNSITNSEEDYLLSPVADENGHFFDSREEIESLPNNADANGAYNIARKGLWIMEQIKKTDNLAKLKLTISNKEWLHFAQNKPYLNE

SEQ ID NO: 240 - protein, 1245 aa, unidentified
  REGION 1..1245: note = Sequence from GenBank assembly GCA_902791765.1
MNDLKQFTGLYSLSKTLRFELKPIGRTQEWIEKNHVLENDEQRNEDYPKVKEMIDDYHKLCINESLKDAHFDWNPLRDAIIQNRHEKTDESKKALEVEQAKMRALIHKKLSDFKHYNELNAATPSKLINDILPKDKAVESFSSFSTYFEGFQENRKNIYTEKAIGTSVPYRIVHDNFPKFLSNIAVFDNIKTLCPEVVRQVATEMSPFLHGVLIEDIFSVDFYNILLTQEGIEFYNHILGGVVKEEHHYQGVNQLVNLFRQAHTELTTKKQSLTMVPLYKQILSDRESISDILQPIDTEEQLITLLNQFYQHITNYSINGNDINVIKELTDLVISLDKFNPDGIFLSAKSLTDISHSLYGQWNILKDKLFDKAVETYGNINVAKNKKKVDAFVNKDAYSLAELSFGDGISVTQYFTGLTGSFDTINDIWEQFQNWCNSTDTPKFVHNDSGTELLKNLLDTIMEVLHKCSVLVVSLENNLDGDFYNTFLPLYEELRNVVSVYDRTRNFLTQKPSDISKKIKLKFDIPSLGVGWGINKERKNKAILLFKDGLSYLGIMNVKGTLDFDGKAEPDEPTYRKMVCINHSKPYMDLPNSFFRQTGIDKFHPSERILKIYEAFKKDSKSVDIKEVRELIDYYKEAINRNKDWNSVSFTFSPTETYETIDDFYKEVARQSYQLSFTDISQKQIDEWVENGQLYLFQLYNKDYAEGFHGRKNLHTLYWESLFSAENLSDTVIKLGSNAELFYRPQVIKQPVKHEVGTKMLNRRDKSGMPIPDAIYRSLYQYFNGKKTESELTTEERAYTSQVIVKDVQHEIIKDRRYTKKHHYQFHVPIVSNANATGKVKLNDKVIEYIQSNPEINIIGIDRGERHLIYLTLINQRGEILKQKTFNIVGNYNYQEKLKQREKERDEARKSWQSIGKIKDLKEGFLSAVVHEIAKLMVEYNAIVVLEDLNRGFKRGRFKVERQVYQKFEKMLIDKLNYLSFKDRAIDQDGGILRGFQLTAETKSYTDIGRQTGFLFYIPAAYTSKIDPVTGFVNLFNLNDITNAEKRKDFFMNMKRIEMRNGNVEFEFDYRKFKTYQTDFQNEWTVNTAGKRIVFDAEKRQSKDIYPTQEIVRAFDNKGIKLKDGMDLKAIIAGIEETNVKNASFFSSLFYAFKTTLQMRNSNASTEEDYIMSPVAKNGYQFCTNKVDKEEDAEGYCIAKLPVDADANGAYHIALKGLYLIKNPKTKKIENEKWFQFMVEKLYLK

SEQ ID NO: 241 - protein, 1302 aa, unidentified
  REGION 1..1302: note = Sequence from GenBank assembly GCA_902792795.1
MKAIDTFCGQKNGYSRSITLRNTLVPVGKTEENIQKLKLLEKDLERSRAYVEVKKLIDGFHRVFIEEVLSKTDLEWGPLYDQFELFQNEKDKQKKNKIKKDLETLQAAMRKQIVKKFKEDERFDKLFKKELLSDFVPAVIKTDESGSISDKKAALDAFKGFATYFTGFHQNRQNMYSEEAQSTAISNRIVNENFPKFYANVKLFEYLQKEFPEIIKDTEKSLANFLQGKKIASVFSKEGFNAVLCQSGIDFYNTVIGGISGEAGDKKVQGLNEKINLASQQLPAEEKHKLKRKMTVLYKQILSDRATVSFIPEGFESSEQVYESVKQFKEQSLDKAVPLIRKLVDTNDCDLNQIYVPAKEVTDFSLKLFGNWSILHDGMFLLEKDSLKKSLSEKQVEALRKEIAKRDCTLSDLQKAYERWAKEYNIPVEKAARDYFNIAELRIDEKSKEKKFVNILKELDEKYCKINFEKKENLIKEKEAAAPIKDFLDEAQSLYHYLKLVDYRGEEQKDSDFYSKYDEILQTLSEIVPLYNKTRNYVTKKPNEIKKVKLSFDCPTLANGWDLNKEASNDAVILRKNGNYFLGIYNPNDKPKFDACKNDEECYEKMIYKLLPGPNKMLPKVFFSTKGKETFAPPKEILLGYEAGKHKKGDDFDKQFMQKLIDWFKAAINNHEDWKNFNFRFSPTESYEDLSGFYKEVERQGYKISFQKISVSAINSLVDSGKLFLFQIYNKDYSTGKGGGDGSTGKKNLHTLYWENLFSEENLRDVCLKLNGEAELFWRDANPDVKDVCHKKGSALVNRTTLDGATIPEEIYQEIYKFKNNIAKSISDKAKELLDSGKVVCKEAKFDITKDRRFTKPTYLFHCPITMNFKAPEISNKDFNAKVQKILKDNPDVKIIGLDRGERHLIYLSLINQNGEIELQKTLNLVEQVRNDKTVSVNYQEKLVQKEGGRDKARKNWQTIGNIKELKEGYLSNIVHEIAELMVENNAIVVMEDLNFGFKRGRFAVERQVYQKFENMLIEKLNYLVFKDRKVGEPGGVLNAYQLSNKSANVSDVGKQCGWIFYIPAAYTSKIDPKTGFANLFYTAGLTNVEKKKEFFDKFDSVRFDRKTNSFVFAFDYGNFSDNADFKKKWEVYSCGERLVYSKADKTKICASPTEDLKALFDKQGINWNSEENFIDQIHAVQPERENCAFYDGLYRSFMAILQMRNSKPNSSNQEDDYLISPVMAADGTFYDSRVEAAKGKDAEGKWISKLPVDADANGAYHIALKGLYLLKNDFNLNDKGYIENISNADWFRFAQEKNYAR

SEQ ID NO: 242 - protein, 1328 aa, unidentified
  REGION 1..1328: note = Sequence from GenBank assembly GCA_902793385.1
MKTIDKFCGQANGYSRSITLRNRLIPIGKTEENIQNQNLLDNDIIRSRAYVEVKKMIDDFHRSFIEDVLSKIELKWDDLYHQFDLFQNEKDKQKKTIIKKEMETCQGEMRKQIVKKFKDDDRFDKLFKKDLLTEFVPTVIKNDELGTISDKQTALNVFKGFATYFTGFHQNRQNMYSEKAQSTAISNRIVNENFPKFYSNVKVFEYLQDNFPEIISQTEQSLSVLLKGKRLADIFTEDGFNAVLSQRGIDFYNTIIGGVAGEAGTQKLQGLNEEINLARQQLPIEEKYKLKCKMSVLYKQILSDRSTTSFIPAGFESSNEVYESIKQFKELSLNTIISEAKTLFEKSDYNLEHIYVTAKGVTEFSLKLFGNWSILHDGLFLIEKDGAKKSLSEKQIETLRREIAKRDYSLSELQNAYEMWAKENDVAVEKTVKNYFKIAELRANEKTKEKCFVEILKKIESAFEKIDFEKQENLIKEKESATPIKDFLDEVQNLYHYLKLVDYRGEEQKDTDFYSKYDEILQTLSEIAPLYNKVRNFVTKKPNEIRKIKVMFDSSSFLNGWGTEYGTKEAHIFIDSGKYYLGIVNKKLDKKDVESLKADGEHMVSKVIYDFQKPDNKNTPRLFIRSKGESFAPAVSKYNLPITDIIDVYDKGLFKTEYRKINPEEYKKALEKLIDYFKLGFSRHDSYKHYNFSWKKTSDYADIADFYTDTIKSCYQLKFEKVNFDCLLNLSNSGKLFLFQIYNKDYSTGKDGGNGSTGKKNLHTLYWENLFSEENLRNVCLMLNGKAELFWRDANPNVKAVCHKKGSILINRTTSDGETIPEETYQEIYKYKNPDKQEKDFKLSDAAKELLDSGKVVFKDAKFDIIKDHHFTQKTYLFHCPITMNFKAPEIKRKFNENVQQVLKNNPDIKIIGLDRGERHLIYLSLINQKGEIELQKTLNLVEQVRNDKTVSVNYQEKLVQKEGERDKVRKNWQIISNIKELKEGYLSNIVHEIAKLMVDNNAIVVMEDLNLGFKRGRFAVERQVYQKFENMLIEKLNYLVFKDKENTEPGGVLNAYQLTDKTANVSDIGKQCGWIFYIPAAYTSKIDPKTGFANLFYTAGINNIEKKKAFFDKFDSIRYDRKTDSFIFSFDYSKFGDNTDFYKKWEVYSKGERFVFDKPDHWKSYKKIETSSKKSEKAVICVNPTEELKVLFDKQDINWNSEKNFIDLIHTVQGKRENCVFYDGLYRSFTAILQMRNSNAKTGEDYIISPVMADDGTFFDSREEFKKGEGSKLPVDADANGAYHIALKGLSLLKRFDVASEAELKKFDMKISNADWFKFAQEKSYAK

SEQ ID NO: 243 - protein, 623 aa, unidentified
  REGION 1..623: note = Sequence from GenBank assembly GCA_902793705.1
LKFMWDFIDFYKDAVAKHPIWSKFNFVYSPTESYEDIGAFFNEVSKQAYKIRFSYIEESQINEWINNGQLYLFQLYNKDYAEGAHGRKNLHTLYWESLFSPENLSSIVLKLNGQAELFYRPQSIKQPVTHKMGSKMLNRRDKSGMPIPEAIYRSLYLYFNSKKTESELTLVEKSYLDQVVVKDVTHEIVKDRRYTKPEFFFHVPITFNVNADGNEYINEQVMEYLKDNPDVNIIGIDRGERHLIYLTLINQRGEILKQKTFNMVGNYNYHAKLEQREQERDQARKSWQSIGKIKELKEGFLSAVIHEIAKMMIENNAIVVLEDLNFGFKRGRFKVERQVYQKFEKMLIDKLNYLSFKDRKPDEAGGILRGYQLAQQFTSFQRLGKQSGFLFYIPAAYTSKIDPVTGFVNHFNFNDITNAEKRKAFFMKMERIEMRNGDIEFEFDYRKYKTYQTDYQNIWTVNSSGKRIVMRLVENGRKQMTDYYPTQEIVRAFKEMGIQLNEGTNIKSLLVDIDASPKNASLYGALFYAFQKTLQMRNSNSTTEEDYILSPVAQNGIQFNTNDEANKGRDTNGNWVSRLPVDADANGAYHIALKGLYLLMNPQTKKIENEKWLQFMVQKPYKN

SEQ ID NO: 244 - protein, 1219 aa, unidentified
  REGION 1..1219: note = Sequence from GenBank assembly GCA_902793715.1
MENIYKNFEQQYPVNKTLRFELKPLGETSEYIRNSNLLNEDKDRAGDFERVKGILDRYYKNYISNNLKNLKLEDLKAYAEEYLSVSRDKKKLDSLAEHLRNDVATCLSKSSEYSILFKEKVITSELEKMIQKENIDKSQKDADLEAIKKFQGFTTYFIGFFKNRENMFSAEPKATAISNRLITENLPRFLDNVQIYTSVKDIIDFEEIVQEVINDSGTKAMDFFSASTYTNFVCNEDIEKYNAVIGGKANIQGINEKINLYNQQHEKRQHIPRMSPLYKQILADRESVSDRFASFTSDTELLKAVNTELKRIAGIVEKDLSQLFSRIKDYDLDRIYIQNGSGLTKICQSQYGSWKIVSDCISKEYDELFPKKAKKKNDAYFDSVKKYKKREKSISVGRIDGLIKKYTTESSRIEQYFIDQVESTEGAVHQFLKVYNQNIECLKNYQGKGHGLQADKDMTGVIKTVMDSVASIEQMMRPLLVKDIALQKDQAFYTEFESIYASVEPAISLYNKVRNYLTKKPYSTEKIKLNFGNPQFLGGWSQSKERDYLSVMLRKDGLYYLGVMDKSSNTLFRGELPEDNTDNYEKMDYKLLPDPKKMLPKVFFAKSRIDDFHPSQDILEIKTKEKYKKSLSDMYKLVDFYKKALNEHEDWKNFHFNFSDTKQYKTINDFYAEVEQQGYILSFRKVSREFINDAVKSGKLYLFQIYNKDFSPYATGNQNLHTLYWKAVFDEKNLKHVVYKLNGGAEVFFRKASIDPENRVVHPKNQPIKKKNALAESQDKVSLFPYDLVKDKRYTIDKMLFYVPITMNFGVSKKKINEQVIGTIRKKSDIYVIGIDRGERNLLYLSLIDFQGRIIKQQSLNVIHNDKGCNQDYHQLLERREKEMMDARRSWSTIESIKELKEGYLSQAIHIITEWMMSYPSIVVLEDLNSGFKNSRKKVDKQVYQKFEKMLIDKLNYLIDKNLPADVDGGIYHAYQLTDQFKNFQSMKKQSGFLFYIPAWNTSKIDPTTGFVDLIHFKYTSVDASKQMIQKFKSVSYDKADELFKITFDYKDFTDRAFGKRNEWTITSYGSRIENSRTPGSNKWKSEEINLTEEYKKFFDKMNIDFTRTDLKEQLLQQDSKDFYAVFFRLLRLTMQIRNSKTGTDVDYMVSPICNASGTYFDTRIGRAEWPLDADANGAFNIARKGLLVMDQIRQSTGYKIKTAISNQEWLSYAQEHTI

SEQ ID NO: 245 - protein, 610 aa, unidentified
  REGION 1..610: note = Sequence from GenBank assembly GCA_902790465.1
MIYTSQSEEEKNKNYKISFKYINSAKIDEMVEKDEMYLFQIYNKDFSSYSNGNYKLNTMYWNNIFDSNNIENIIFNIAGGATIFFRAKSLERRETHKQGEVLSNKNKDNQKTTSIFSYPLIKNKRYTEDKIKLHVPIEINCNSKNLNQRKLNYRVNKNIQNLKEVNIIGISRGTNDLLYATVINSKGEIIEQTSLGKIKNVVFDKSINATREIISDYNKIIDTKEKERENANNRNKTGEELNLEKSIKDIKNGYISQAVNVIANLVKKYNAIIVFEDLNDKKSEKIESKIEKSIYRNIQNAVITKLSYLVDKKKKDKFAEGSILNGYQLTYYCEQDLVEKQEDSEEKQNGIVFYVSTYMTTNIDPKTGFVNCFSVSLPKSIDGVKDFLEKFKEIKFNTKEGYYEFVVNYENISKYTRYFIGEKLSKKEWVICSYGDRIEESKDINTGKTKYKKIDLTKEFKCLFEKFNIGQGKKLKTNIIKFLENLDLGSGLQAKIKGTNRFINKQSIQQEEFCREFMRLFALILKLQNSDGKESYIISPVKDSDGKFFDSRKHNEYSSIVPENEISNSAYNIARKGLLIINRIKKTKELERIDLNLRDEYWLNFVQNNN

SEQ ID NO: 246 - protein, 1249 aa, unidentified
  REGION 1..1249: note = Sequence from GenBank assembly GCA_902794405.1
MKDLKQFIGIYPVSKTLRFELRPIGKTQEWIEKNKILEIDEQKAEDYPKVKALIDDYHKVCIRESLKGVHLDWTPLRQALEEYQQTKSDESKAMLEKVQTSMRKQIATAIKDFRHFKELTAPTPQKLIDDVFPGIYEDEALKSFNRFAMYFKGFQDNRNNIYSAEAISTGVPHRLVHDNFPKFLADVEVYENIKTTCPEIIEQVAKEMQPFLEGVMIDDIFTLDFYNSLLTQDGIDFFNQVLGGVAEEGKQKYRGINEFVNLYRQRHPELTGKKKALTMVPLFKQILSDRETLSYIPQQIESERQLIDVLSQFYAHITDYEYNGKTINILKELSNLTNRIADYDPAGIFLSAKTLTDVSQKLFGRWSAINDKLYEKAASQFGDPAIVKNKKKIDAYLAKDAFALSEINLDSEHSLSTYFSEMAFVVEQVGGNWLQFKEWCKGEDKQLFINNADGTEIVKNLLDAMMDILHRCAVLVVPIEYDLEKDFYNDFLPLYAELENVIFVYNRTRNYLTKKPSDTKKFKLNFGTPTLGDGWGVNNERKNKAILLFKDGLSYLGIMNVKGTLKFEEAKDASLPSYKKMTCRYLSKPFMDLPHTFFSEKGISTFHPSERIMDIYKNGTFKKDSPSYSIAALRDLIDFYKDAINKHEDWVKYGFTFSPTESYEDISSFYSEIAKQAYKISFTNVSEQHVNDWVENGQLYLFQLYNKDYAEGVHGRKNLHTLYWENLFSEENLNNLVLKLGGQAELFYRPQCINKPARHVVGSKMLNRRDKSGKPIPEPIYRNLYQYFNGKKQEGELTVAEKAYIDQVVVKETNHEIVKDRRYTKPEYFFHVPIVFNANADGNEYINERVLDYLKDNPDVNIIGIDRGERHLIYLTLINQRGEILKQKTFNVVGNYDYHAKLEQREKERDDARKSWKSVGKIKEFKEGFLSAVIHEIAVMMVENNAIVVLEDLNFGFKRGRFKVERQVYQKFEKMLIDKLNYLSFKDRKADEEGGILRGYQLAQQFTSFQKLGKQSGFLFYIPAAYTSKIDPVTGFVNHFNLNDITNAEKRKAFLMNMERIEMKNGNVEFEFDYRKFKTYQEDYQNVWAVNTSGKRIVFDSETRKAKDVYPTQEIVAAFKEKGINLKDGTDLKSLIADIEANAKNASFYYAIFDAFKRTLQMRNSNAVTDEDYILSPVVRNDKQFCTTDEVNKGKDADGNWLSKLPVDADANGAYHIALKGLYLLNNPQTKKIENEKWFQIMVEKPYLK

SEQ ID NO: 247 - protein, 1252 aa, unidentified
  REGION 1..1252: note = Sequence from GenBank assembly GCA_902794785.1
MENLKQFIGIYPVSKTLRFELRPVGKTQEWIEKYKMLENDESKAADYPVVKKLIDEYHKVCIRESMKNVRLDWGPLKEAIEDYQKTKSDEAKKRLETEQAMMRKQIAAAIKDFKHYKELTAATPSDLITSVLPEFSDNEALKSFRGFASYFIGFQENRNNIYSSDAISTSVPYRLVHDNFPKFLSNLEVYNKIEATCPEIIQQASEEMQPFLEGVMIDDIFSLDFYNSLLTQDGIDFFNRVIGGVSEEGKQKYRGINELVNLYRQQHKEFEGSKKAMTMIPLFKQILSDRDTLSYIPAQIVTEEELVASINQFYEHITHFERDGKVINILNELVALLSKIDTYNPDGICVTANKLTDISQKIYGKWSIIEEKLKDKAIQQYGDISVAKNKKKVDAYLSRKAYSLSDLCFDGEFHISRYFSDTPQTLHAINGYWLQFNEWCKNEEKQKFLNNPAGTDVVKSLLDAMMELSHKCSVLVMPEEYEVDKSFYNEFIPLYEELDTLFLLYNKVRNYLTRKPSDVKKFKLNFESPTLANGWDQNKEMKNNAILLFKDGKSYLGVLNAKNKAKIKQAKRDTSSTSYKKMIYKLLSDPSKDLPHKIFAKGNFDVYKPSEYILEGRESGKYKKGPTFDKKFLHDFIDFYKAAIAIDPDWSKFNFKYTPTELYEDIGSFFSEIKKQAYKISFTDIPESQVDEWVDNGQLYLFQLYNKDYAEGAHGRKNLHTLYWENLFTDENLNNLVLKLNGQAELFCRPQSIKKPVSHKMGSKMLNRRDKSGMPVPESIYRSLYQFYNGKKKESELTAAEKQYMGQVIVKDVTHEIIKDRRYTRQEYFFHVPITFNANAEGNEYINENVLNYLKDNPDVNIIGIDRGERHLIYLTLINQRGEILKQKTFNVVNSYNYQAKLQQREKERVEARKSWDSVGKIKDLKEGFLSAVIHEISKMMIENNAIVVLEDLNFGFKRGRFKVERQVYQKFEKMLIDKLNYLSFKDRQASEDGGILRGYQMAQKFVSFQRLGKQSGFLFYIPAAYTSKIDPVTGFVNHFNFNDISNAEKRKEFLMKMERIEMRNGNIEFEFDYRKFKTFQTDYQNLWTVSTYGKRIVMRIDDKGYKQMVDYEPTKEIINVFKNKGIQLTEGSDLKALISDIEANTVNASFFNTLLYAFQKTLQMRNSNAATEEDYILSPVARDGHYFCSTDEANKGRDTQGNWVSRLPVDADANGAYHIALKGLYLLRNPETKKIENEKWLQFMVEKPYLE

SEQ ID NO: 248 - protein, 1304 aa, unidentified
  REGION 1..1304: note = Sequence from GenBank assembly GCA_902795205.1
MIENFCGQKNGYSRSITLRNRLIPTGKTEENIEKLQLLDNDIKRSKAYVEVKTMIDDFHRAFIEEVLSKAKLEWGPLYDLFDLFQNEKDKQKKSKIKKELETIQGVMRKQIVKKFKDDDRFDKLFKKELLTEFVPTVIKADESGTISDKRAALDVFKGFATYFTGFHQNRQNMYSEEAKATAISNRIVNENFPKFYANVKVFECLQKEYPEIITETEEALSEILNGKKLADIFSADGFNSVLSQSGIDFYNTIIGGVAGEAGTQKLQGINEKINLARQQLPVEEKSKLKRKMSVLYKQILSDRSTASFIPIGFESSDEVYESVKQFKEQSLDNVISAAKELFEKSDYDLSQIYVPAKEVTDFSLKLFGNWSILHAGLFLIEKDNSKKTFTEKQIENLRKDIAKRDCSLADLQNAYERWAKENDVKAEKTVKNYFRIAELRADEKSREKTSVEILNKIESAFEKIDFEKRDNLIKEKETAAPIKDFLDEVQNLYHYLKLVDYRGEEQKDTDFYSKYDEILQTLSEIIPLYNKVRNFVTKKPNEVKKVKLNFDCPTLASGWDLNKESSNDAILLRKDGNYYLGIFNSKDKPKFENCSTDGECYEKMIYKLLPGPNKMLPKVFFSTKGQETYLPPKEILLGYEEGKHKKGDNFDKAFMYKLIDWFKTAINQHEDWKNFNFKFSQTESYEDLSGFYKEVESQGYKIIFKEVSESYINSLVDSGKLFLFQIYNKDYSTGNDGGNGSTGKKNLHTLYWENLFSEENLRDVCLKLNGEAELFWRDANPDVKAVCHKKGSVLVNRTTADGETIPEEIYQEIYKFKNPDKQEKNFKLSDTAKKLLDSGKIVCKEAKFDITKDRHFTQKTYLFHCPITMNFKAPEITGKKFNEKVQQALKNNPDVKIIGLDRGERHLIYLSLINQKGEIELQKTLNLVEQVRNDKTVSVNYQEKLVQKEGERDKARKNWQSINNIKELKEGYLSNIVHEIAELMVKNNAIVVMEDLNFGFKRGRFAVERQVYQKFENMLIEKLNYLVFKDKKTTEPGGVLNAYQLTDKSANVSDVSKQRGWIFYIPAAYTSKIDPKTGFANLFYTAGLTNIEKKKDFFDRFDSIRYDRKTDSFVFTFDYSGFSDNADFNKKWEVYSRGERLVFSKAEKSVVRVNPTESLKALFDKQGINWSSEDNVIDQIQAVQAERENCAFYDGLYRSFTAILQMRNSVPNSSKEEDDYLISPVMAEDGSFYDSREEAEKGKTPDGKWISKLPVDADANGAYHIALKGLYLLQNNFNLNEKGYIENISNADWFKFVQEKKYAK

SEQ ID NO: 249 - protein, 1245 aa, unidentified
  REGION 1..1245: note = Sequence from GenBank assembly GCA_902795225.1
MSKYEQFINQYPLSKTLRFRLIPQFETDERFRERRYLETDRVRAGEYALVKKMIDRYHKGFIERCLSKVNLQGVEEYADLYFRPDKTREDYDRLEEMAAGMKKQISTAFTSDAEFKSLFNKDMIVKLLPGFVTPEELEIVEHFSKFTIYFTNFHQVRQSMYTAEGKASEVSERVIGQNLPKYLDNCKSGSLVLKALDPDVLEDIAHTFAEKLHVDVRSIFEPAYFRSFMAQSGIDIYNQILGGYTEEKGAKKVQGFNELINLYNQTHKDLQLPRLKPLYKQILSDRSTLSFIQDKFESDNQVLNAIYDFCNKEDEETGMCAREAFAELSGLLQDLDSYDARHIYLGAGKPITDLSNGIFGDWAAIQRALEAIYDADHIEKERATAKYEKEKKAYFKGRKSYSLAEIQNAATVARKDKAVNTRIAGRVANDSRELLLRCQLAYTAAAELISNPYTHKKKLQNNDEVIKLIKELLDAMMDLLHCAKGFLGSGKEEDKDEIFYGAFTPLYEQCAELIPLYNRVRNYATTKPYSEDKFKLNFNDGEFLSGWSQRVEKKGAMLAEKDGLYFMMVFDEKLPMTDQEKLLAEDPQDPATLFSYQFQKPDNKNTPRLFIRTKADKFSPAVTELNLPIHDVLDIYDKGMFKREYAKIDPQGQREALAKMIDYFKLGFTRHPSFQMFDFSNWKPSSEYESIDKFYRDTILSCYRIERKSLDWAVLRQLVAEGRVYLFQIYSQDFSPNAHGAENLHTIYFKTLFDERNLQHVCFQLNGGAEMYFRPASLSLEETAIHKAYQPIGNKNPLNEKKTSTFDYDIVKNKRFTEDQYFLHMPITLNFSYAGSERLNMKVREAIRAEAEKDTYVIGIDRGERNLLYVVVVDSQGRIVEQKSLNEIVSEHNGVKSVTDYHALLTSREAARMASRQSWTAIEDIKHLKEGYLSLAVGEIVRLMIKYDAILAIEDLSADFKNSRAKIEHQVFQQFEKKLIDKLNFCADKRLQPEELGGVLNAYQLTEKFTSFSQIGHQNGFLFAMPPWMSSRIDPVTGFVDLLRPKYENMNKAKVFFSSFDRISYDSDRDFFVFDTNFDRFPKTEASPRKMWKLCSYGPRIMLEKDDKGQWKSKELDLTQAFKDFFDAAEIDINTKDLIPQILAKNDASFFSGLTKLMALMLQMQNAVPGAKEEYLISPAMDDNGGFFWTATADDSMPKNAAANGAYNIARKAQWAIKQIREADQDKLMKTPISPKNSDWLEFIQ

SEQ ID NO: 250 - protein, 807 aa, unidentified
  REGION 1..807: note = Sequence from GenBank assembly GCA_902795505.1
MTETGDTLSQDKPAVAKIKALLDALKDLQHFIKPLRGSGEENEKDELFYGSFLMMWDELDTVTPLYNKVRNWLTRKPYSTEKIKLNFDSPTLLNGWPNPQTNSGAIFRDEEGLYYLAILDAQNRACLNELSSNVNGNEDHIEMMKYLQGGDMGKNVQNLMVIDGEVRKVNGRKETSGEFAGQNLRLENAKHQYLPKNINEIRLKQSYLTSSPTFNKKDLVSFIEYYIPLVEAYYSDYVFHFRKSSEYKSFADFTEHINQQAYQVQFKPVSKTSLYSLVEEGKLYLFRIWNKDFSEFSKGTPNLHTLYWKMLFDERNLADVVYKLNGQAEVFYRKASIKPENKIVHPANRAIANKNELNKKRTSSFDYDIIKDRRYTVDKFQFHVPITINFKATGQTNINPIVQDTIRRGGFTHIIGIDRGERHLLYVSLIDLKGNIVKQMTLNEILNEYKGLTHKTNYHDLLAKREGERTDARRSWDTIENIKELKEGYLSQVVHIISKMMVEYNAIVVLEDLNPGFMRGRQKIERQVYEKFEKMLIEKLNCYIDKKAEPIEIGGLLHPLQLSCDIKKWKKSHQCGCLFYIPAWNTSKIDPVTGFVNLFDTHYETREKARSFFSKFQRIHFNSEKNWFEFTFDYGNFTTKAEGTRTQWTLCSYGTRIRNFRNPLKNHQWDDEEVELVDEFKHLFDKYSIDIFGNLKESICNQTDAQFYKELMGLMKLLLQMRNSRTNSEVDYLLSPVADEQGHFFDSREGIGSLPDNADANGAFNIARKGLWIIRKVQGTPSDEKMSLAISNKEWLQFAQNRPYLND

SEQ ID NO: 251 - protein, 811 aa, unidentified
  REGION 1..811: note = Sequence from GenBank assembly GCA_902798235.1
MLSQNKPAVAKIKALLDALKDLQHFIKPLLGSGEENEKDELFYGSFQMMWDELDAVTSLYNKVRNWLTRKPYSTEKIKLNFDNAQLLDGWDENKETTNASILLYKDGNYYLGIIKKEDRKILGSPMPTDGECYDKVVYKFFKDITTMVPKCTTQKKDVIAHFMHSDDDYILYDKKTFDAPVTITKEIYNLNNVLYNGVKKFQIEYLRSTGDKRGYEHAVFIWKSFCMHFLKAYKSTSIYNLVLVEQQINSYYDLSSFYNAVNLLLYNLSYRKVSVNYIHSLVDEGKLYLFRIWNKDFSEYSKGTPNLHTLYWKMLFDERNLADVVYKLNGQAEVFYRKSSIQPEHRIVHPAGKPIANKNEHSKEPTSTFKYDIVKDRRYTVDKFQFHVPITINFKAAGQENINPVVLDAIRRGGFTHIIGIDRGERHLLYLSLIDLQGNIVEQMTLNEIINEYKGLKHKTNYHDLLAKREGERTEARRSWDTIENIKEMKEGYLSQVVHIISKMMVEYNAIVVLEDLNTGFMRSRQKIERQVYEKFEKMLIDKLNCYIDKQVGASDIAGLLHPLQLACEAKKWKRSHQCGCLFYIPAWNTSKIDPVTGFVNLFDTRYENAAKAKAFFGKFGSIRYNAEKDWFEFAFDYNDFTTKAEGTRTEWTLCTYRERIRTFRNPQKNHQWDDEEIVLTDAFKQLFDKYDIDMKGNLKEAICAQNDVQFFKDMMELMKLLLQMRNSITNSETDYLLSPVADEKGQFFDSRRGITTLPDNADANGAYNIARKGLWVIRKIQETAENEKPSLAITNKEWLQFAQTKPYLNE

SEQ ID NO: 252 - protein, 1244 aa, unidentified
  REGION 1..1244: note = Sequence from GenBank assembly GCA_902798615.1
MKTFNDLTGLYSLSKTLRFELKPVGKTKDNIETKGIIAQDEKRAEEYKKVKDIIDRYHKSFIDMCLAGLVLRTTSDGNNDSLEDYVALASKSNRDEKEEKDFDDVKTALRKQIVDAFKKGNSYSDLFKKELILNHLPDFVTDEQEKQMVENFSKFTTYFTGFNENRKNMYSDEEKSTAIAYRLIHENLPMFIDNIKSFARITEQEDIDFIADIEHSFREELKGQSITKMFSLENFTNTLTQGQIELYNKIVGGRVEDSGAKKQGINEHVNLYNQKHKDARLPLLKPLYKMILSDRVVLSWLPEEFATDEEMLDAINETHNNLKDVLVDVRELLQNIDNYDTEHIYIANDKGLSDISQQIFGQYDVYTSAIKAELRDSITPSAKERKDPELLDKRINNIFKASKSFSIDYLNSHVELGKTIQSYYAQLGAYDRNGEQRINLLSQIDLAHVDALEVLSGKHTNLNQSEESIKKIKALLDAYKALQHFIKPLLGNGDEADKDNEFDAKLRAIWNELDIITPLYDKVRNRLTRKPYSTEKIKLNFDNAQLLNGWDMNKEPDCTSVLLRKDGQYYLAIMDKKSNHAFDTDDLPCDGECYEKMEYKQMALPMGMGAFVRKCFGTAKALGWQCPRHLMTSDGKIIIKDEEAQKVLPELIDCYKSFLDIYEKDGFKYKTFSFKFKPSSEYEKLSHFFAEVPSQGYKCSFRNVSVSFINQLVDEGKLYLFQIWNKDFSEYSKGTPNMHTLYWKMLFDERNLANVVYKLNGQAEVFYRKRSLDLDKTTIHRANQPIANKNMQNEKRESTFCYDIVKNRRYTVDKFQFHVPITINFKATGGDNVNASVLDVIRNNGIEHIIGIDRGERHLLYLSLIDMKGNIVKQMTLNDIINEYKGNTYTNNYKELLQAREGDRKEARQNWQKIENIKELKEGYLSQVVHVITKMMVEYKAIVVLEDLNGGFMRGRQKIERQVYEKFEKMLIDKLNYYVDKQKDANENGGLLHAYQLASKFDTFKKLGKQSGCLFYIPAWNTSKIDPVTGFVNMLDTRYENADKARNFFSKFKSISYNADKNWFEFVIGDYSKFTDKAKDTRTDWVLCTYGTRIKTFRNPEKLNQWDNKEIVLTNEFKKVFMEAGIDINGNLKEAICTLTEKKHLESLMQLMKLLVQMRNSETNSEVDYLLSPVADTEGHFYDSRNCGDNLPKDADANGAYNIARKGLWAVMKIKASKPQENLKLGISNKEWLQFAQEKPYLND

SEQ ID NO: 253 - protein, 527 aa, unidentified
  REGION 1..527: note = Sequence from GenBank assembly GCA_902798705.1
YNKDFSTRSKGKGTPNLHTLYWRMLFDERNTKDLVYKLNGQAEIFFRRASIKPENQVIHQANQPIENKNPLRKAIKPNSTFSYKITKNRRFTLDHFEFHAPITMNFKAPGITNINPLVIDKIRKSEITHVIGIDRGERHLLYLSLIDLKGNIIKQMTLNTITDKWAGGEIATDYQALLDQKEGDRLEARRNWKTIENIKELKEGYLSQAIHLIAQLIVENKAILVLEDLNTHFMHGRQKVEKQVYQQFEKQLITKLNYYVDKKKDADTAGGLLHALQLTNKFESFEKLGKQSGFLFYVPAWNTSKIDPVTGFVNLLNLHYETREKASLFFSKFKCISFNTEKNWFEFVMDYNEFTKKADGTRTNWTLCTFGERIETFRNPQANLQWDNRTINLTQAFNDLFQDYGIDIYGNLKNQICSQQKAKFFEQLLHLMKLMLQMRNSKKNSTSAEDDYILSPVADDNGVFYDSRSCSESLPRDADANGAYNIARKGLWIIKKIQASSADERLNLTITNKEWLNFVQTKQYLND

SEQ ID NO: 254 - protein, 1344 aa, unidentified
  REGION 1..1344: note = Sequence from GenBank assembly GCA_902799665.1
MKTIENFCGQKNGYSRSITLRNRLIPIGKTEENIEKLQLLDNDIKRSKAYVEVKSMIDDFHRAFIEEVLSKAKLEWGPLYDLFDLFQNEKDKHKKSKIKKELETIQGVMRKQIVKKFKDDDRFDKLFKKEILTEFVPTVIKADESGTISDKRAALDVFKGFATYFTGFHQNRQNMYSEEAKATAISNRIVNENFPKFYANVKVFECLQKEYPAIITETEEALSEILNGKKLADIFSADGFNSVLSQSGIDFYNTIIGGIAGEAGTQKLQGINEKINLARQQLPTEEKNKLKRKMSVLYKQILSDRSTASFIPIGFESSDEVYESVKQFKEQSLDNVISAAKELFEKSDYDLSQIYVPAKEVTDFSLKLFGNWSILHDGLFLIEKDNSKKTFTEKQIENLRKEIAKTDCSLADLQNAYERWAKENDVKAEKTVKNYFKIAELRADGKSREKTSVEILNKIESTFEKIDFEKRDNLIKEKETATPIKEFLDEVQNLYHYLKLVDYRGEEQKDTDFYSKYDEILQTLSEIVPLYNKVRNFVTKKPNEVKKVKLNFDNVSLAKGWDVNKESDYTCILLRRSGLYYLGVLNPKDKPKFDSENNGETSINKNDCYEKLVYKYFKDVTTMIPKCSTQLNDVKQHFKNSNEDYILENNNFIKPLVISKRIFDLNNKTFDEKKMFQIDYYRNTGDLKGYTEAVKDWISFCMTFVHSYKSTCIYDFSSLGDCSQFKQVDQFYKEINLLLYKIWFVNVTAEKINSLVDSGKLFLFQIYNKDYSTGKDGGNGSTGKKNLHTMYWENLFSEENLRDVCLKLNGDAELFWRDANPDVKDVCHKKGSVLVNRTTSDGETIPEEIYQEIYKFKNPNKQEKSFKLSDTAKELLDSGKVGFKEAKFDIIKDRHFTQKTYLFHCPITMNFKAPEITGRKFNEKVQQVLKNNPDVKVIGLDRGERHLIYLSLINQKGEIELQKTLNLVEQVRNDKTVSVNYQEKLVQKEGERGKARKNWQTISNIKELKEGYLSNIVHEIAKLMVENNAIVVMEDLNFGFKRGRFAVERQVYQKFENMLIEKLNYLVFKDKKVAEPGGVLNAYQLTDKVANVSDVGKQCGWIFYIPAAYTSKIDPKTGFANLFYTAGLTNIEKKKDFFDKFDSIRYDRKTDSFVFTFDYSDFGDNADFKKKWELYSRGERLVFSKAEKSVVHVNPTENLKALFDKQGINWSSEDNIIDQIQAVQAERENCAFYDGLYRSFTAILQMRNSVPNSSKGEDDYLISPVMAEDGSFYDSREEAEKGKTTDGKWISKLPVDADANGAYHIALKGLYLLQNNFNLNENGYIENISNADWFKFVQEKEYAK

SEQ ID NO: 255 - protein, 776 aa, unidentified
  REGION 1..776: note = Sequence from GenBank assembly GCA_902799815.1
MWYDLVRNYLTKKPQDDVKENKLKLNFDNPILLGGWSDGQEKVKSATLLKYMNEMYLCILKTRNIFDTSKENPIYIEHSDASRLILRNLKFQTLAGKGFKGENGITYGEMGKSDPQKAIQCLQKIIAERYVSKYPLLEEYVSNAYTDKSKFDAAITETLKQCYVCEFEPIDWNLVVEKQNNGELFLFKIHCKDYMPKVSGKKDLQTLYWEDVLSEGSKHQLCAGAEIFMRKPVAKAPRKKHSVGSKLVNKKDSDGNTIPERIYSEIYLYVNGKTESISAEAQRYIDEQKAVIKDVKHEIIKDKRFYGETKFMFHCPVKLNYESKGYKGPNYAYPEVNAAIRESLQQSDNLQFIGIDRGEKHLVYSCTLDKDCNIIACHDHDNINGTDYVQKLEDVANERIIAKKNWQAEDKIKDLKSGYISHVVHRLVEEVIKDGNTIEPHAYIVLEDLNTEMKRGRQKIEKQVYQNLETALAKKLNFVVDKDAQPNELGSVGKALQLTPPISNYQDIEGKKQFGVMLYTRANYTSVTDPATGWRKTIYLKNGKEEDIKKQVLEKFSDLGFDGRDYFFEYTEAHAGHTWRLYSGKDGQPLPRFQNKKQLQQDKNIWVPEQVNVVEILDILFAHFDKTKSFKQQIEQGVELVKIERRKETAWQSLRYALDLIQQIRNTGKEQEDDNFLYSPVRNSKGEHFDTRNHANNGKLSAIKDADANGAYNIARKGLIMDAHIKYWMACGQPSKKNTLDLFVSDKEWDLWLLDREGWEQELPAFALRNANESKD

SEQ ID NO: 256 - protein, 1245 aa, unidentified
  REGION 1..1245: note = Sequence from GenBank assembly GCA_902799975.1
MKDLKQFIGLYPVSKTLRFELRPVGKTQEWMEKNHVLEHDGKRAEDYPRVKELIDAYHKICISESLKGVALDWCPLRDAIERNRQEKSDESKTALEEEQAKMRKKICEKLSKFEHYQELVKADTPSKLINGILPHEEALDTFNKFAVYFEGFQENRRNIYSSEAISTGVAYRLVHDNFPKFLANIEVFENIKEICPEVIQQVATEMAPFLEGVMIEDVFTVSYYNAVLTQNGIDYYNQILGGVAKDGQNYRGINEFVNSYRQAHPELAAKKKSLTMVPLFKQILSDRETLSDIARPIESEKQLIEVINHFYHRITNLDINGKNVNVVKELTGLVLSIDTYNPEGVFISAKSITDVSHSLYGHWNRINEKLYDKVAEAIGGIQTAKNRNKVEAYLKKESYSLSELSFSDDVSITQYFSALTNSADSINSLWLQFQCWCKSAEKPQFVHNEVGTEYVKMLLDAIMLVLHKCGALLVSLENELDSDFYNKFLPLYAELENVILVHTRVRNFLTKKLSDTGKIKLKFDTPSLGAGWGINKEKTNKAVLLFKDGLSYLGIMNVKGTLDFNCKIEADEPTFKKMVCRNYSKPYMDLPNSFFSQNGISKFHPSERIQKIYLAFKENSKNVDIKKVHELIDYYKDAISRHEDWGSFGFKYSPTESYENINDFYMEVAAQSYKLSFIEVPQKQVDEWVETGKLYLFQLYNKDYAEGAHGRKNLHTMYWECLFSEENLSNLFIKLGGQAELFYRPQSIKKPVSHKVGTKMLNRRNKEGKPIPDAIYRSLYQYFNGKKTEAELTAEEKAYISQVIVKDVHHEIIKDRRYTKQFFYQFHVPIVFNANAPKRPKINEKVLEYIKENPDVNIIGIDRGERHLVYLTLINQHGEILKQKTFNVVGDYDYHEKLKQRENERDQARKSWQSVGKIKDLKEGFLSAVVHEIAKMMIEYNAIVVLEDLNWGFKRGRFKVERQVYQKFEKMLIDKLNYLSFKDVDTANEGGILRGYQLTEPVANYTDIGKQTGFLFYIPAAYTSKIDPATGFVNHFNFNDITNAEKRKEFFMKMERIEMKNGNVEFEFDYRKFKTYQTDFQNVWTVNTSGKRIVFDTEKREHKAVYPTQEFVQAFGDKGITLEEGMDIKAFIGGIEADIKNASFYSTLFYAFKTTLQMRNSNADTREDYILSPVVHDGRQFCTTDEVEKGKDADGNWISKLPVDADANGAYHIALKGLYLLLNPQTKKIENEKWLQFMVEKPYKA

SEQ ID NO: 257 - protein, 1234 aa, unidentified
  REGION 1..1234: note = Sequence from GenBank assembly GCA_902800995.1
NMDHFTNLYPVSKTLRFELIPDKRTKAILERTDLIAQDEHRAESYKLVKKIIDRYHKKFIDSVLGTLKLPLDELDSLHELYSKSQKSDADKKALEKIQDKLRKLIADALTKDSRYKRIDKKELIREDILSVIEPEEQALIDEFRDFTTYFTGFHENRRNMYSAEAQSTAIAYRLIHENLPKFIDNMATFEKIAASPVAEHFPQLYQEMAEYLNVREIGDLFKLDYYTELLTQSQIEAYNAVIGGRTVEESGKKIQGINEYVNLYNQQQPSRDTRLPKLKPLFKQILSDREAVSWLPEEFESDKDMLKAVKECYHSLNDHVFDPLRELLTNLSSYNLDAIFIPNDLSLTDISQAMFKDWSVIKKAIVEDVKRNCPLKRNEKADNYEERISKLIKRENSFSIGYMNHCIQEKDICDHFATLGASDNGEEQTVNLFLQILNAYTDAQSLIENDYPEDRNLAQDKENVARLKALLDAVKALQRFVKPLLGNGDEPDKDERFYGELAVLWEELDHITPLYNKVRNRMTRKPYSIEKFKLNFQNSTLLDGWDLNKERDNTGVIMRKDGKYFLAIMNKQFNRIFVDAPQAGHDEDTFEKMEYKLLPGANKMLPKVFFSKSRIEEFKPSPELLEHYEKGTHKKGDNFSLKDCHELIDFFKASIAKHEDWSKFDFHFSPTDTYEDLSGFYREVEQMGYKISYKQIPVSYIDKMVEEGKLFLFQIYNKDFSPYSKGTPNLHTLYWKMVFDERNLADVVYKLNGQAEVFYRKKSLDYDRPTHPANQAIKNKNPETTKKESTFDYDIIKDKRFTMDKFQFHVPITINFKATGSGSINPLVNQYIHDHDDLHFIGIDRGERHLLYVTVIDSKGCIKEQFSLNEIVNEYQGNTYKTNYRSLLDKRDDERQRERQSWNTIEGIKELKQGYLSQVIHKIVSLMVKYHAVVVLEDLNMGFKRGRQKVESSVYQQFEKALIDKLNLLIDKKIDADQPGGLLHAYQLTNKFTSFRDMGRQNGFLFYIPAWNTSKIDPVTGFVDLLHPRYESVEKSRSFFCKFKSIRYNQDKGWYEFTMDYNDFTTKAEGSQTEWTLCTHGTRVETFRNAEKNSSWDSREVNLTDEFNALFATYGIEPQGNLKQAIAEQSQKEFFDKLTHLLALTLQMRNSITGSEVDYMISPVADENGKFFDSRTCGKELPENADANGAYNIARKGMWVARQIQAAHVDEKVNMAISNKEWLSFAQSKPYLND

SEQ ID NO: 258 - protein, 1256 aa, unidentified
  REGION 1..1256: note = Sequence from GenBank assembly GCA_902801105.1
INNQMKDLNQFVGVYPVSKTLRFQLKPIGRTEEWIQKGCIIEEDEQKALDYPIVKKLIDEYHKVCISKALEREAFGDKPIDWEPLREALNNYRKTKSDEDKKSLEKEQESVRKLIGKALTAFEHYGELTAATPKDLIKSVLPDFQYDKALESFNGFATYFQGFQENRKNIYSTEAISTGVPYRIVHDNFPKFLTDLEVYETIKSECPEVIEQASKELQPYLEGVMLDDVFSLDFYNSLLTQEGIDFFNRVIGGVSEEGKQKYRGINEFSNLHRQQHPDLAYKKKATTMIPLFKQILSDRETLSFIPQEIKDDKMLIQTIVDFNAHIFSFMRDGTEINIVASLVELIKLLITFETNGIYIAEKYTTEISNKVYGNWGVIKERLHEQAILQFGDENKAKNKKKIDAYLSKDAYSLAELQIDVKEFVSSYFKEIDQSIFVLNGYWKQVIEWNNHKEGHFLNNQEGTEIIKRYLDAYMDVMHRLAIFNVSGDYEVDTNFYNEYTPLFAELESIIPLYNRVRNYLTKKPSDIKKFKLNFSAPTLANGWDQNKERDNKAVLLFKDGLSYLGVMNTKNMPDFNVTGNTTEECYSKMIYKLLPGPNKMLPKVFFSKKGIETFSPSSHILKLYNDGTFKKGPSFNVVHLHELIDFYKDAINRHPDWSKFGFEFSPTESYEDISAFYNDISKQAYKVRFTEISAKQVDEWVNTGQLFLFQLYNKDYAEGAHGKKNLHTLYWENLFSDANMKDLVLKLNGEAELFYRPQSITTPVAHKMGTKMLNRRDKSGMPIPDAIYRDLYQYFNGKKNEQDLTDAAKMYLDNVIVKDVTHEITKDRRFTKPEFFFHVPITFNVNADGNEFINDHVMEYLKDNPDVNIIGIDRGERHLIYLTLINQRGEILKQKTFNTVNQFNYHEKLTQREKERDEARKSWSSIGKIKDLKEGFLSAVIHEIATMIVENNAIVVLEDLNFGFKRGRFKVERQVYQKFEKMLIDKLNYLCFKDCQPDEKGGILRGYQLAQKFVSFQRLGKQSGFLFYIPAAYTSKIDPVTGFVNHFNLQDITNAQKRKDFFMKMESIRMKDGHIEFEFDYRKFKTFQTDYQNHWIVSTRGKRIVMIPDENGYKQMHDYYPTEEIKKAFKKMDITLQDGADIKSLITDIDEPSFYSTFFYAFKSTLQMRNSNAQTEEDFILSPVAKNGRFFCSTEEANKGLDSNGNWISKLPVDADANGAYHIALKGLYLLNHLDTKKIEHAEWLRYMAEKPYLNS

SEQ ID NO: 259 - protein, 1243 aa, unidentified
  REGION 1..1243: note = Sequence from GenBank assembly GCA_902801425.1
MKTFNDLTGLYSLSKTLRFELKPVGKTKDNIETKGIIAQDEKRAEEYKKVKDIIDRYHKKFIEMCLANLKLKTISDGNNDSLKEYVTLASKANKDEKEDNDFKDVKTALRKQIVDAFKKGGSYSDLFKKELIQVHLPDFVTDEQEKQMVENFGKFTTYFTGFNENRQNMYSDEEKSTSIAYRLIHENLPMFIDNIKSFAKIAEHEDIDFLPDIENGFKEELKRLKAQSISEVFDLANFTNTLTQSQIDSYNAIIGARHDENGDKVQGINQYVNLYNQKNKDARLPLLKPLYKMILSDRGALSWLPEEFATDEEMLAAINETHGNLKNVMTDVRKLLQNIDSYDTEHIYIANDKGLTDISQQIFGQYDVYTSAIKAELRDSITPSAKERKDPELLEKRINDIFKASKSFSIEYLNSHVDSDKTIQSYYKELGAYDRNGEQRINLFSQIELAYVDAHDVLLGKHTNLNQSEDSIKKIKALLDAYKALLHFIKPLLGNGDEADKDNEFDAKLRAIWDELDIVTPLYDKVRNRLTRKPYSTEKIKLNFDNAQLLNGWDMNKEPDCTSVLLRKDGQYYLAIMDKKSNHAFDIDELPCNGECYDKMDYKLLPGANKMLPKVFFSKSRIKEFAPSKEICDAYQKGTHKKGANFSIKDCRRLIDFFKDSIAKHEDWSKFPFTFSDTSTYEDISGFYREVEQQGYMLGYRKVSVSFINQLVDEGKLYLFQIWNKDFSEYSMGTPNMHTLYWKMLFDERNLANVVYKLNGQAEVFYRKKSLDLNKTTIHRANQPIANKNMQNEKRESTFCYDIVKNRRYTVDKFQFHVPITINFKATGSDNINASVLDVIRNNGIEHIIGIDRGERHLLYLSLIDMKGNIVKQMTLNDIINEYKGNTYTTNYKELLQAREGDRKEARQNWQKIENIKELKEGYLSQVVHVITKMMVEYKAIVVLEDLNGGFMRGRQKIERQVYEKFEKMLIDKLNYYVDKQRDANENGGLLHAYQLASKFDTFKKLGKQSGCLFYIPAWNTSKIDPVTGFVNMLDTRYENADKARNFFSKFKSINYNADKNWFEFVIDDYSKFTDKAKDTRTDWVLCTYGTRIKTFRNPEKLNQWDNKEIVLTDEFKKVFMEAGIDINGNLKEAICTLTEKKHLESLMQLMKLLVQMRNSETNSEVDYLLSPVADTEGHFYDSRNCGDNLPKDADANGAYNIARKGLWAVMKIKASKPQENLKLGISNKEWLQFAQEKPYLND

SEQ ID NO: 260 - protein, 618 aa, unidentified
  REGION 1..618: note = Sequence from GenBank assembly GCA_902800305.1
MTALQNLVTDENVKKYRDSLDYEALSAEIGKILATGRERKYVPISIDEIKNLLKNSRNNKGEEVRTFMFKISNKDLSFAETMKKGERMSHGAENLHTMYFRALLDTLQNTFDIGTGTVFFRQASDKRKMKYDEKNPTHRKGKELDFKNPYNKGKKKSVFEYDLIKDKRYTKDSYLFHLSITQNFQQRGNKADLNAMVCDYIRAQKDLRIIGIDRGERNLLYATMIDGEGRILTQKSFNVIDYKGETAKGEPFQVKTDYHQLLNEKAEKMRSQQREWKEMDKIQDIKDGYLSVVVHELAKMVVENNAIIVLEELNMGFMGSRQSQLANVYQKFEEKLRNKLQFYVDKHKGHDEPSGLYHALQLAGMETKDNQNGFIFYIPAWNTSKIDPVMGFVSLFNLKYTNIKDAKALFSTFDKIKKNEETGHYDFTFKYSSMARKKMAKKMDGTKDDWTISTHGSRIVKEQKGNYWEYRKIESLTSEFDALFETYGIDTGVNLQDKIVKCDKADFFKNLIRLMKWTLQLRNYDDKGNDYLISPVCYKGNDYFCSLDYDNDEGMCASKFPYQMPKDADSNGAFNIARKGLMLCERIKNGEKNRIIKGTEWLQYVQGMSDKYIENNKY

SEQ ID NO: 261 - protein, 1360 aa, Moraxella bovoculi
MLFQDFTHLYPLSKTVRFELKPIGRTLEHIHAKNFLSQDETMADMYQKVKVILDDYHRDFIADMMGEVKLTKLAEFYDVYLKFRKNPKDDELQKQLKDLQAVLRKESVKPIGNGGKYKAGHDRLFGAKLFKDGKELGDLAKFVIAQEGKSSPKLAHLAHFEKFSTYFTGFHDNRKNMYSDEDKHTAIAYRLIHENLPRFIDNLQILTTIKQKHSALYDQIINELTASGLDVSLASHLDGYHKLLTQEGITAYNRIIGEVNGYTNKHNQICHKSERIAKLRPLHKQILSDGMGVSFLPSKFADDSEMCQAVNEFYRHYTDVFAKVQSLFDGFDDHQKDGIYVEHKNLNELSKQAFGDFALLGRVLDGYYVDVVNPEFNERFAKAKTDNAKAKLTKEKDKFIKGVHSLASLEQAIEHHTARHDDESVQAGKLGQYFKHGLAGVDNPIQKIHNNHSTIKGFLERERPAGERALPKIKSGKNPEMTQLRQLKELLDNALNVAHFAKLLTTKTTLDNQDGNFYGEFGVLYDELAKIPTLYNKVRDYLSQKPFSTEKYKLNFGNPTLLNGWDLNKEKDNFGVILQKDGCYYLALLDKAHKKVFDNAPNTGKSIYQKMVYKYLEVRKQFPKVFFSKEAIAINYHPSKELVEIKDKGRQRSDDERLKLYRFILECLKIHPKYDKKFEGAIGDIQLFKKDKKGREVPISEKDLFDKINGIFSSKPKLEMEDFFIGEFKRYNPSQDLVDQYNIYKKIDSNDNRKKENFYNNHPKFKKDLVRYYYESMCKHEEWEESFEFSKKLQDIGCYVDVNELFTEIETRRLNYKISFCNINADYIDELVEQGKLYLFQIYNKDFSPKAHGKPNLHTLYFKALFSEDNLADPIYKLNGEAQIFYRKASLDVNETTIHRAGEVLENKNPDNPKKRQFVYDIIKDKRYTQDKFMLHVPITMNFGVQGMTIKEFNKKVNQSIQQYDEVNVIGIDRGERHLLYLTVINSKGEILEQRSLNDITTASANGTQMTTPYHKILDKREIERLNARVGWGEIETIKELKSGYLSHVVHQISQLMLKYNAIVVLEDLNFGFKRGRFKVEKQIYQNFENALIKKLNHLVLKDKADDEIGSYKNALQLTNNFTDLKNIGKQTGFLFYVPAWNTSKIDPETGFVDLLKPRYENIAQSQAFFGKFDKICYNADKDYFEFHIDYAKFTDKAKNSRQTWTICSHGDKRYVYDKTANQNKGATKGINVNDELKSLFARHHINDKQPNLVMDICQNNDKEFHKSLMYLLKTLLALRYSNASSDEDFILSPVANDGGVFFNSALADDTQPQNADANGAYHIALKGLWLLNELKDSDDLNKVKLAIDNQTWLNFAQNR

SEQ ID NO: 262 - protein, 653 aa, unidentified
  REGION 1..653: note = Sequence from GenBank assembly GCA_002395825.1
MKSLKQFIGIYPVSKTLRFELRPVGKTLEWIEKNKVLESDEQKAEDYPKVKTLIDEYHKVCIRESLKGAHFDWMPLRSALEKYQKSKSDEDKAILEKEQTLMRKQVAAAIKEFRHYKELTAPTPQKLIDNVFPDIYESDALKSFYRFSIYFRGFQENRNNIYSAEAISTGVPYRLVHDNFPKFLADIEVFEGIKANCPEVIEQAATELQPFLEGVMIEDIFSIDFYNSLLTQDGIDFFNQVLGGVAEEGKQKYRGVNEFSNLYRQQHPELAAKKKALTMIPLFKQILSDRDTLSYIPQQIESEQQLIELLKQFYSHITAFDYNGKTVDVLKELTKLSGNISNYNPDGIYLSAKSLTDVSQKLFSKWNVITERLSEEAIKRFGDVSITKNKKKINAYLSKDAYTLSEIPLDNDHSLSMFFAELPKTIENVGSNWLQFMEWCKGESKQLFLNNADGTEIVKNFLDSIMEILHRCSVLVVSVEHDLDKDFYNDFLPLYAELENAVMVYNRVRNFLTKKPSDTKKFKLNFGVPSLGDGWDQNKERDNKAIILFKDGKSYLGIMNAKDMPIIKERDESTPSSYKKMIYKLLADPAKDFPHTFFSKKGIDTYHPSRYILNGREQGKYKKGETFDKKFMRKCFATSQVTEIQQETDTPQN

SEQ ID NO: 263 - protein, 1284 aa, unidentified
  REGION 1..1284: note = Sequence from GenBank assembly GCA_002395965.1
NMEQFTNLYQVSKTLRFELVPDERTKVFLENSDLIAEDEHRAESYKLVKKIIDRYHKAFIENILSSLTLQCESDNRQNSLEEFCELYHIAQKTDADKKSIERVQEQLRKQIVGALTKDARFKRIDKKELIREDLMQIITPDEKALIDEFRDFTTYFTGFHENRKNMYSHEAKSTAIAYRIIHENLPKFIDNIETFNKIASSPVAENLSLLYNDMKECLNVNRIDEMFSLDYFSEVMTQSQIEVYNAIIGGKTLNDGTKIQGINEYVNLYNQKQARENRLPKLKPLFKQILSDREAVSWLPEEFNTDAELLKTVNDFYSNLHDSVFSDLRELLENISNYNLAGIFIPNDKTLTDISQSLYGDWGLINRAITEDVKSSVPQKRNETFENYDDRISKIIKRQDYFSIDYLNRLLAGKDTNICSHFETLGAVNTETKQTENLFAQIFNAFTEAKDLLSTPYPCEKNLAQDKVNVAKLKTLLDAIKDLQHYVKPLVSAAEAPDKDERFYGDIAVIWEELDVITPLYNKVRNRMTRKPYSLEKFKLTFNIKGNFLGGWVDSKTDKSDNGTQYGGYLFRKKNLIGEYDYFIGMSSNKKLFRPNPNASGQYERLDYYQPKSQTIYGNSYAGKEGYEHDKQELITAIVSFLENKHHEELLQQIRTVQTPSAMMNIIQSNSDIFNQLLKDKFFAAINKKVTDNLHKTIIGLNRVSSASDYKNEKFAIFTEPQQIIDEICNEKIFNYFVVDDNEIDNAMNDYSKPFLFFKISNKDLSYSESSAKGHRKSRGIDNLHTLYFKSLMSGNQSVIDIGTAEVFFRRSSIKSKGVTHPANVDIPNKNKIGNKSVSKFPYDIIKNKRYTVDKFGFHLSIIYNYKEPKDININGIVREYIKTVEDLHFIGIDRGERHLLYVTVIDSKGRIKEQFSLNEIINEYNGNSYRTNYRQLLEKRDEERQRERQSWNTIEGIKELKQGYLSQVIHKIVTLMVKYKAIVVLEDLNMGFKRGRQKVESSVYQQFEKALIDKLNLLVDKKLDADSTGGLLHAYQLTNKFTSFREMGHQNGFLFYIPAWNTSKIDPVTGFVDLLHPRYESVDKARAFFCKFKTITYNKAKDWFEFDLDYNDFTTKAEGTRTCWTLCTHGARVETFRNPNANSNWDNREVDLTAELKALFDKYGINPEANLKEEIARQTERNFFERLIHLLKLTLQMRNSITGTEVDYLVSPVADENGAFYDSRTCADGLPLNADANGAYNIARKGLWAARQIHEAPIGEKVKLAISNKEWLQFAQSKPYLDD

SEQ ID NO: 264 - protein, 1283 aa, unidentified
  REGION 1..1283: note = Sequence from GenBank assembly GCA_002424135.1
NIMEEFTNLFSLSKTLRFELRPEGKTLEFINKNGLLVQDKHRAESYIKVKDIIDKYHKAFIENALRDFRLNYDDIEAYYSYYIIRKREETQKKQFAQVQSSLRKQIADCFKKNDSSRLFGKELIKEDLIEFVKTEEDRLMVKEFKDFTTYFTGFHENRKNMYSEEEKSTSIAYRLINENLPKFIDNISIFERVKTTEVTNDLKTLYSDMEEYLNVLSIDELFNLKYFTEVLTQTQIDVYNAIIGGKSFDDGRKIKGLNEYINLYNQNQKEKKNRLPKLKPLFKQILSDRNAISYIPDEFKSDNEVLSSIEKVYQDLNQEIFNKERIGEYSLKDLLLNIKSFELDKIYVRNELALTEISQKQLGKWDIVNKGIINYYITNNPKKVKEKQEKYDEKVKKYLKSFDSYSIQFINDCLEDKTKKIEDYFIQCKNKDDKNLFEQIETNYNAIKDLLNTDYPENKKLSQDKESVEKIKIFLDSIKELQWFIKPLLEKGEIAEKDERFYGEFSSMWKLLDDSITPLYNKVRNYITKKPYSQEKIQLFFQNKGQFLGGWVDSKTEHSDNGTQAGGYLFRKKNDIGEYDYYLGVSSDSKLFRNSDINNGKFERLDYYQPKSMSIYGNSYIGGNYNEDKLILIDCIKKYIEQISDSTIKQKINNEFLKIKEETPSLLLNTLKTISYNNYKELFEYEPFKDENKRVTKNLKDTILTLNRIPKSKQYYNIEFNSFVEAQKAIEELCKEKVFNYFLVSDNEMETLQNRLDNPLLLFKITNKDLSFAETYIEGKRKSRGIDNLHTMFFKLLMSGSQNTLDIGTGKVFYRKKSLNYSEEIYQKGHHYNTLKDKFHYPIISNKRYCYDKFQFHLSIFQNYQQPKSIITKDFNQNVNQYIKENKVKHIIGIDRGERHLLYLSLIDLKGNIIKQFSLNEIINEYKGGKYKTNYRDLLNKKEVDRDEARKNWQTIENIKELKEGYLSQVIHKISELMIEYNAIVVLEDLNSAFMRGRQKVEKQVYQKFEKMLIDKLNYLVDKKKDPNEKGGLLNAYQLTSKFESFQKLGKQSGFLFYVPAWNTSKIDPTTGFVNLFDTRYENREKTITFFDKFKRIEFNKAKDYFEFEFDYSKFTTKAEGTKTNWTICTNSTRIETFRNKDKNSQWDNKEIVLSQAFKDLFDKYMIEYKSNLKANILSQDRKEFFEELLHLLKLTLQMRNSKTGTDIDYLISPVANQKGVFYDSRVVNDTLPKNADANGAYNIARKGLWVINQIKETNDLKTLKLAISNKQWLSFVQNLIEK

SEQ ID NO: 265 - protein, 1292 aa, unidentified
  REGION 1..1292: note = Sequence from GenBank assembly GCA_009775705.1
MNVFNQFTGLYSLSKTLRFELRPIGKTLEHIEKKRLIAQDEQRAREYEKVKDIIDRYHRKFIHMCLSGLKLKLNSDGGDDSLEDYVKIISLDKRKEKEEKQFSKIKSNLRKQIVEAFKSGATYGDLFKKELIKNHLIHIAESEEEKFMIENFSKFTTYFTGFHENRKNMYLEEEKSTAIAYRLINENLPIFYDNMQSFKKIAGSEVAAHFVEIETVYQEYLKYLNVGHISEIFSLDYFTNVLTQEQIEVYNCIIGGRVEDGVKLKGINEYVNLYNQQQRDRKERLPLLKPLYKMILSDKVDVSWLPEKFESDEEMIGAINGLINDLQPVLYSDNDKSLKYLLQHIGEYDLSRIYISNDLGLTDISQQMFGQYDVFTKGIKDEKRQHATPTKKERDNAELYEERINKLFKLEKSFSIAYLNSISGKTQTIEAYFASLGAYDRNGEQRNIFTQIEKARVAAADILAGKHTNLNQSKSDIKFIKDLLDAFKALQHFVKPLLGSGDEADKDNAFYAKLREVWEALTFITPLYNKVRNRLTCKPYSEEKFKLNFENNGNLLGGWVDSQTKSDNGTQYGGYIFRKKNSIGEYDFYLGISADTKLFRKDDSVINDGTLYERLDYYQVKSHTIFGASYHGNYDVDANSLFEAFHDEIIKQELDTSFLRKDKETIIGYLKRIKKTDSQTYNILLKSEIIENKYSEMKQHILATLASLSRVPAAVEISKRKELSIEELFDEISKMPSKSFGFFPVKIEDVTHANGREVKPLFLFKISNKDLAYAEKHSKGLRKSRGTDNLHTMYFKVLLSMIQGTYDIGTGEVFYRKHTHELAENTARHKANQPIKNKNKANRTQESVFPYEIIKDRRYTCDKFQFHLSIITNYNSPKTADVNKLVHDAIRNGEIEHIIGIDRGERHLLYLSLIDLKGNIIKQFMLNEIINEYNGHTHSTNYKDLLVSREGDRNEARRNWQKIENIKEIKEGYLSQVVHIIAKMMVEYKAIVVLEDLNGGFMRGRQKIERQVYEKFEKMLIDKLNFYVDKQKDTDDIGGVLHPLQLTNKFESFRKLGKQSGWLFYIPAWNTSKMDPVTGFVNMHDTRYENADKARCFFLKFDVIRYNVEKNWFEFTFDYNNFHKKAEGTQTKWTLCTYGTRIKTFRNPKKNNQWDSEKVILTDEFKEVFADAGIDITGNLKEAICSLTEKKYLEPLMHLMKLLLQMRNSETRTEVDYILSPVADADGNFYDSRKNIATLPKDADANGAYNIARKGLWAIRKIQTTPIGEKLNLAISNKEWLQFAQQKPYLDE

SEQ ID NO: 266 - protein, 1320 aa, Prevotella sp.
MENYQEFTNLFQLNKTLRFELKPIGKTCELLEEGKIFASGSFLEKDKVRADNVSYVKKEIDKKHKIFIEETLSSFSISNDLLKQYFDCYNELKAFKKDCKSDEEEVKKTALRNKCTSIQRAMREAISQAFLKSPQKKLLAIKNLIENVFKADENVQHFSKFTSYFSGFETNRENFYSDEEKSTSIAYRLVHDNLPIFIKNIYIFEKLKEQFDAKTLSEIFENYKLYVAGSSLDEVFSLEYFNNTLTQKGIDNYNAVIGKIVKEDKQEIQGLNEHINLYNQKHKDRRLPFFISLKKQILSDREALSWLPDMFKNDSEVIKALKGFYIEDGFENNVLTPLATLLSSLDKYNLNGIFIRNNEALSSLSQNVYRNFSIDEAIDANAELQTFNNYELIANALRAKFKKETKQGRKSFEKYEEYIDKKVKAIDSLSIQEINELVENYVSEFNSNSGNMPRKVEDYFSLMRKGDFGSNDLIENIKTKLSAAEKLLGTKYQETAKDIFKKDENSKLIKELLDATKQFQHFIKPLLGTGEEADRDLVFYGDFLPLYEKFEELTLLYNKVRNRLTQKPYSKDKIRLCFNKPKLMTGWVDSKTEKSNSGTQFGGYLFRKKNEIGEYDYFLGISSKTQLFRKNEAVIGDYERLDYYQPKANTIYGSAYEGENSYKEDKKRLNKVIIAYIEQIKQTNIKKSIIESISKYPNISDDDKVTPSSLLEKIKKVSIDSYNGILSFKSFQSVNKEVIGNLLKTISCLKNKEEFHDLIKKDYQIFTEVQAVIDEICKQKTFIYFPVSNVELEKEMGDKDKPLCLFQISNKDLSFAKTFSANLRKKRGAENLHTMLFKALMSGNQDNLDLGSGAIFYRAKSLDGNKPTHPANEAIKCRNVANKDKVSLFTYDIYKNRRYMENKFLFHLSIVQNYKAAKDSAQLNSSATEYIRKADDLHIIGIDRGERNLLYYSVIDMKGNIVEQDSLNIIRNNDLETDYHDLLDKREKERKANRQNWEAVEGIKDLKKGYLSQAVHQIAQLMLKYNAIIALEDLGEMFVTRGQKIEKAVYQQFEKSLVDKLSYLVDKKRPYNELGGILKAYQLASSITKSNSDKQNGFLFYVPAWNTSKIDPVTGFTDLLRPKAMTIKEAQDFFGAFDNISYNDKGYFEFETNYDKFKIRMKGAQTRWTICTFGNRIKHKKDKNYWNYEEVELTEEFKKLFDKYDIDYRDGNLKEEILKIDNRKFFDALIKLLQLTLQLRNSDDKGNDYIVSPIANADGKFFNSNDGCKELPLDADANGAYNIARKGLWVVRQIKDKKDKISKLSNQEWLKFAQEKPYLK

SEQ ID NO: 267 - protein, 1323 aa, unidentified
  REGION 1..1323: note = Sequence from GenBank assembly GCA_902761775.1
MNDLSQFTNLYSLSKTLRFELKPIGKTLENIEKNGILERDNRRSIGYKSIKKVIDEYHKAFIDRVLNDYERKLDETGRIVWRDSLNELYRLYHLSSTEAKRNEEIRKTQEILRKQISECFKKDRQYSRLFGKELIREDLTEFVNTPLFEQYILSQKGNEDLSIDDVRHIQEDVIEDIAQFRDFTTYFSGFYENRRNMYVADDKATSIANRLIMENLPKFIDNIDVFERIAQSEVSGNLETLCKEMEAYLNVNSIAEIFCLDYFSMVLTQKQIDVYNAIIGGMSLEDGTKIKGLNVYVNLYNKKQKEKTCRLPKLKPLFKQILSERNAISWLPDEFTSDKELLESIEKCYQDLKNSVFEGKDSLMVLLKELGEYDLEHIYLHNDSQLTNIAQKQYGDWATIKRAFEESVKAATPAKRNETTEKYAARIEKILKATDSLSLSQINRMLKAYMGDDFKTIESYFTAMGAEDTVDGQKPNLFIRIENAYADVQPLLNTPYPEDKKLSQDKANVAKIKNLLDTIKDLLHFVKPLLGNGTKGEKDNRFYGEFIPLWELLDQITPLYNMVRNRLTKKECSDEKIKLFFENNNGRFLSGWTDNQTESDNGTQYGGYLFRKRNGIGEYDYYLGVSDAKKLFRSFKSVPDSDKSDYERLDYYQLKGKTFYGALYKGDYESESANIKRSIDYFISHNGNSEIKGKINTERRKQQPRISTAIGYLKFIRQHDFGLYKLLLQDAEFEKSNQEMIASIRETLLSLVRIPSAHEYADKTYTLFSNMMDDVEILLKSKVFSYFTVSQSELDEVLVREEKPLYLFKITNKDLSYAETHEKGLRKTRGTDNLHTLYFKALMSGNQSVFDIGSGAIFFREKKINYTDEQMRKGHHHEMLKDKFNYPIISNKRYAFDKFQFHLSISINYNADKNKDINPMVNAYLKESNSTHIIGIDRGERHLLYLSLIDLQGDIVEQYTLNEIGNTNYHDLLGIKEKQRKEARPNWMEIENIRELKEGYMSQVIHIIAQLMVKYNAIVVLEDLNMGFMRGRQKVEKQVYQKFEKMLIDKLNYLVDKQCNATELGGVLNAYQLTNTHKKFLEQYGNQKNALGKQCGFIFYIPAWNTSKMDPTTGFVNLLDTHYENMEKAKAFFGKFKSIRNNAAKGWFEFEFDYDNFTTKAADTRTPWTLYTHGTRIETKRDPKQKNNFVSEEFDLTSKFKELFVKYKIDLNDNLMEQICLQNDASFFKELLHLLQLTLQMRNSKIGTDVDYLISPVMNDKGKFYDSRNCGKNLPENADANGAYNIARKGLWIIDQIKRTDDLSRLRLAISNKEWLQYAQKMV

SEQ ID NO: 268 - protein, 1277 aa, unidentified
  REGION 1..1277: note = Sequence from GenBank assembly GCA_902770705.1
NMDHFTNLYPVSKTLRFELIPDKRTKAILERTDLIAQDEHRAESYKLVKKIIDRYHKKFIDSVLGTLKLPLDDLDSLHELYSKSQKSDTDKKALEKIQDKLRKLIADALTKDSRYKRIFKKELIIEDILSVIKPEEQALIDEFRDFTTYFTGFHENRRNMYSAEAQSTAIAYRLIHENLPKFIDNMATFEKIAASPVAEHFPQLYKEMAEYLNVREIGDLFKLDYYTELLTQSQIEAYNAVIGGRTVEESGKKIQGINEYVNLYNQQQPSRDTRLPKLKPLFKQILSDREAVSWLPEEFVSDKDMLKAVKECYHSLNDHVFDPLRELLTNLSSYNLDGIFIPNDLSLTDISQAMFKDWSVIKKAIVEDVKRNCPLKRNEKADNYEERISKLIKRENSFSIGYMNHCIQEKDICDHFATLGASDNGEEQTVNLFLQIQNAYTDAQSLIENDYPEDRNLAQDKENVARLKALLDAVKALQRFVKPLLGNGDEPDKDERFYGELAVLWEELDHITPLYNKVRNRMTRKPYSIEKFKLNFNIKGNFLGGWVDSKTERSDNGTQYGGYLFRKKNAIGEYDYYLGVSANRKLFRRNSEATGQYERLDYYQPKSQTVYGNSYVGPDGYDHDKRELMEAIVSFAGALGNNVLYQDLASRDTPSSMLTALKEHPQIFQQLQNDEKFAKINSKVTKYLHETILSLVRIPRSQDYVNAEFTLFTEPQEVIDDLCQEKVFTYFVVDDAEIEQAMNDENKPFLLFKISNKDLSFADTFSKGLRKSRGTDNLHTMYFKALMSGNQSTIDIGTGEMFYRKSSISIDKPTHKANVPIKKKNPNNQGAESRFSYDLFKDKRFTVDKFGFHLSFIYNYLAQGQDVNKMAREYIHDHDDLHFIGIDRGERHLLYVTVIDSKGCIKEQFSLNEIVNEYQGNTYKTNYRSLLDKRDNERQRERQSWNTIEGIKELKQGYLSQVIHKIVSLMVKYHAVVVLEDLNMGFKRGRQKVESSVYQQFEKALIDKLNLLIDKKIDADQPGGLLHAYQLTNKFTSFRDMGRQNGFLFYIPAWNTSKIDPVTGFVDLLHPRYESVDKSRSFFCKFKSIRYNQDKGWYEFTMDYNDFTTKAEGSRTEWTLCTHGTRVETFRNAEKNSSWDSREVNLTDEFNALFATYGIEPQGNLKQAIAEQSQKEFFDKLTHLLALTLQMRNSITGTEVDYMISPVADENGKFFDSRTCGKELPENADANGAYNIARKGLWVARQIQAAHVDEKVNMAISNKEWLSFAQSKPYLND

SEQ ID NO: 269 - protein, 1236 aa, unidentified
  REGION 1..1236: note = Sequence from GenBank assembly GCA_902775165.1
MREKNSGLEQFTNLYSLSKTLRFELIPVEGTAEAIQQNGILAEDKKLADSYQKIKPTLDAFHRAFIDRCLSEVKLENLDRYYDLYHVGDEEKRTKKYQDEFKSVKNALRKEVVSYFKKDKRYPKGLFGKELLKTHLPKWIEETGEDWYQDESFVNFTTYFSGYNENRENMYKDKEQSTSIAYRMIDENLPKFVYNIRLFNRLSDTDISGLFSVISEELAPFIFTSSLEEMFELSTFNKLMTQGHIDALNTIIGGYKEGEKVVKGLNGYINEYNQTHPKNRLPMMQMLYKQILSESNSASWLPDAFDSAAELFSGMNNFCDCGLRMNENPSLLEEMKRVLQEIKACDAAGIYIRNDSSINTISNAIFGHYGVIRNALEMYYECQVFPEYRKRLINAKSAKSAEKIKKAKETYVNGTGYFPVREIQDALELYIDTAEFGSNPEIKNRYFKDCISVYLAEGAATYVSRIKEAYNNVSGMIKASYTSDYRLNEDDKDGLKHFLDAVLSLLHYCKPLYVKAEAGIKVDEVFYGQFNPLYEQLQTVNVVYDKVRNYATQKPYSEEKIKLNFGIKGNFLSGWVESKTDASDNGTQYGGYLFRKRNCIGEYDYYLGISSNSKLFRYFNSISKEGASGYERLNYYQPKEQSVYGSAYKGRHPYADDKVLLMSTILDFMKKTKDTEFYEGLLAYSQTDLATPSGCLSRIKEFSTELYENLLRDEKFKDANEEVMQALKATICSMGRLKGAEAVTERQYGVFTEMMNDISTLMSNNVYQYSAVSETELREALQDKKKPLYLFRITNKDLAYAERLEQGKDRKHRGRDNLHTMYFKALMSGEQNVYDIGSGTVFYRPASIARKVTHPAGIPINSKNPNLKDHKNIFEYDLIKDRRFTEDKFQFHLSIIQNYSASGIKSSDYNEKVCQYLRNNPNVNILGIDRGERNLLYISMIDRNGNIVRDENGQLIQYSLNNLTGEYTNASGEIVKFTTPYHTLLDKREKDNADNQRSWGTIGKIKELKAGYMSQVISHITRLMVKYNAIIVMEDLNSRFINSRRKVDKQVYQNFERALIEKLNYLVFKDIPAEESGGLYNALQLADRFTSFRDLQKQSGFIFYIPAWNTSRIDPVTGFVNLLKPKSDNLKQARDFFGKFESICFNSESDWFEFVFDYSNFLSGADYLKSRWTVCTHGDCRYIYDKKMKNNKGGYKKINVTKTIKELFNEYGIDYAEGNDLKEQIVSQNSFFLKTH

SEQ ID NO: 270 - protein, 1277 aa, unidentified; identical to SEQ ID NO: 268
  REGION 1..1277: note = Sequence from GenBank assembly GCA_902778615.1

SEQ ID NO: 271 - protein, 710 aa, unidentified
  REGION 1..710: note = Sequence from GenBank assembly GCA_902791265.1
MKKYLDEDRKRAAQYASIKAILDEEHKKLIERVLSNVPGAIACLKNRKTFAEILSDDGSGILWSRLKEAEEAALKAKSETREAKKTRKAASEAADGAAQTETKEEARFKDLQKKFRELIAALLDTDEKKKSLLEATPSKYIKGMLTESGDTLQPDAREALNTFEKFACYLKGFQENRANLYAAEPQVTAVANRVVNQNFPKFLTACRIMAHIQEHYPAIISDAERNLAANLNGAPLMSRFSPDAFDRCLAQSWIDAYNTILGGFTFKDGTKIQGINETINLYRQQHADAANDRNLAPIPALYKQILSDRDTLSFIPEMFDSDRAVCDSILKFLESLKWETMRSSITSLLDSLDADDPGVFVEKSELTGISHKLFGDWSRIRAALERCAETKFTRKADREKWLNKDIYSLRELNELDFKSFAEDNTSEVPAITDFWRGAHRAEVFSAVESAIQAVLDTLHSEAYPEGDTEPRLRENENDVAAIKDLLDALTGLLHLLKPLQAESPDANMVFYADFNDFYARLDPVIPLYNRVRNYITQKPSEQKKVKLMFNCSTLADGWDRNKESDNNAVILLKDGNYYLAVIQPAQKQTDGKRERKVKFADFETDGAGPCFRKMVYKYLPGPNKMLPKVVFSKSNRDIFDPPAELLRKYEAGMHKKTSPNFDLKFCRELIDFFKVCIAKHADWSKFGFRFTDTAKYNGIDEFYNEISAQG

SEQ ID NO: 272 - protein, 1143 aa, unidentified
  REGION 1..1143: note = Sequence from GenBank assembly GCA_902790465.1
MTNLYPIEKTVCFELRPIGNTLEHFYKNEIIEKAQNRSDEFREIKHLIDPIHKEIIEECFQELSENSEFTRLLEKYEFKPHVINSKKPLPRDKKLIEENIYNKKEIVEIVKDTFRHNPKYKLIFSDKKIDMLKEYYKDDCEKFELISHFEEFASYFEKYDIKLKNIYGCEGKISNTCKSILNRLITDNLPIFYFNTKKNILTKVKFSASFENVKYIDKFASYFSISGIEKYNKIIGNINDAVNKLNQKGKKYSYLGKMKDIFDLDQYSDIVKKISDDKELVEIINIFIDGQDIEELKNTFSNLNDKYNLKKIFVRRGKELDDLLKRIDFKGRARLTTSYVNLFYIDSINRNKVKIYEAISVKINELVDDYIKKYEDVKYILTAKYDSGTKILGQNDKNIAKIKELLESIKAIYDFVSIFIPKKAENRDNIDYEKVNFDIYNKINFERLSIINQIFNHFKDYFTLKNFSTKKIRLNFNVEQLLNTWDIDKIDETLGTILLKEEEEKTKYYLGILNSSNYSKFEYTDVKENNYRQMIYTSQSEEEKNKNYKISFKYINSAKIDEMVEKDEMYLFQIYNKDFSSYSNGNYKLNTMYWNNIFDSNNIENIIFNIAGGATIFFRAKSLERRETHKQGEVLSNKNKDNQKTTSIFSYPLIKNKRYTEDKIKLHVPIEINCNSKNLNQRKLNYRVNKNIQNLKEVNIIGISRGTNDLLYATVINSKGEIIEQTSLGKIKNVVFDKSINATREIISDYNKIIDTKEKERENANNRNKTGEELNLEKSIKDIKNGYISQAVNVIANLVKKYNAIIVFEDLNDKKSEKIESKIEKSIYRNIQNAVITKLSYLVDKKKKDKFAEGSILNGYQLTYYCEQDLVEKQEDSEEKQNGIVFYVSTYMTTNIDPKTGFVNCFSVSLPKSIDGVKDFLEKFKEIKFNTKEGYYEFVVNYENISKYTRYFIGEKLSKKEWVICSYGDRIEESKDINTGKTKYKKIDLTKEFKCLFEKFNIGQGKKLKTNIIKFLENLDLGSGLQAKIKGTNRFINKQSIQQEEFCREFMRLFALILKLQNSDGKESYIISPVKDSDGKFFDSRKHNEYSSIVPENEISNSAYNIARKGLLIINRIKKTKELERIDLNLRDEYWLNFVQNNN

SEQ ID NO: 273 - protein, 766 aa, unidentified
  REGION 1..766: note = Sequence from GenBank assembly GCA_902798705.1
MNNFTNLYPVDLTLRNSLIPIGETLKNMTMHSYIEHDEQRAEAYKLVKGIIDDYHRAFIDSRLASFEFRIESHGTLDSIEEFTTLYNIERDEKRDKEFTTVKQNLRKAISQRLTKCDAFARINKRELIREDLPYFIDSLDISEEEKAEKKKLVEQFAKFATYFSNFHTNRANMYVADEKSTSIAYRLINQNLPVFLDNMKVFAMLKALGFEDALSVIYSDMKEKLNVLSLDELFQQDYYSMLLTQRQITVYNEVIGGRSTKDGEKIKGLNEYINQHNQEHPTARIPFLRPLFKQILSDRVSMSWLPDSFINDEEMIRAINIFHQNIHPLLWGPMEDAGEPLKNILSQIDTFDTEHIFIINDSALTNISQRLFGQYNVITDALLSRLSQEMPRKRGRKPESDEAYNERLRKTFKAIKSFSISEINESLKSYMDEGTYIDISSYFLAMDERNDEYIQQANMFIRIENAYTEAKPFLNELRASNSSYNQDDDAIKYIKVLLDAYKSLQRFINPLVGSGEESSKDDMFYGEFMPIVEELKNLTPLYNKVRNWLTRKPYSDEKFKVNFDNSSFLSGWPQDYETKGGYIVEHNGLYYLFINEVKLDEAQVKFLCDHPDADNATRILLDFQKPDNKNIPRLFIRSKGENFAPAVEKYALPIASVLDIYDQGKFKTEYRSVNPDDYYRSLHKLIDYFKLGFTRHESYFHLFLFRRLWRHECGQYQLPENPTPHIGTLDLQQGFLHSKQRKGNPEPSHPLLAYAFRRKEYQRPCL

SEQ ID NO: 274 - DNA, 38 bp, Moraxella bovoculi
  source 1..38: mol_type = unassigned DNA
gtctaacgaccttttaaatttctactgtttgtagattt

SEQ ID NO: 275 - DNA, 36 bp, Moraxella bovoculi
  source 1..36: mol_type = unassigned DNA
gtctaacgaccttttaaatttctactgtttgtagat

SEQ ID NO: 276 - DNA, 36 bp, Moraxella bovoculi
  source 1..36: mol_type = unassigned DNA
gtcttaatcccttttataacagggaaggttttgaac

SEQ ID NO: 277 - DNA, 36 bp, Moraxella bovoculi
  source 1..36: mol_type = unassigned DNA
gttcaaaaccttccctgttataaaagggattaagac

SEQ ID NO: 278 - DNA, 32 bp, Moraxella bovoculi
  source 1..32: mol_type = unassigned DNA
atcgcaccccatacgggtgcgtgtgttgaaac

SEQ ID NO: 279 - DNA, 40 bp, Moraxella bovoculi
  source 1..40: mol_type = unassigned DNA
aagtaagatcgcaccccatacgggtgcgtgtgttgaaact

SEQ ID NO: 280 - DNA, 36 bp, Acidaminococcus sp.
  source 1..36: mol_type = unassigned DNA
gtctaaaagaccatatgaatttctactttcgtagat

SEQ ID NO: 281 - DNA, 18 bp, Acidaminococcus sp.
  source 1..18: mol_type = unassigned DNA
atttcaatccacgccccc

SEQ ID NO: 282 - DNA, 31 bp, Acidaminococcus sp.
  source 1..31: mol_type = unassigned DNA
atttcaatccacgccccctcgcgggggcgac

SEQ ID NO: 283 - DNA, 28 bp, Acidaminococcus sp.
  source 1..28: mol_type = unassigned DNA
tttctaagctaccttcacggtagtaagc

SEQ ID NO: 284 - DNA, 37 bp, Francisella tularensis
  source 1..37: mol_type = unassigned DNA
ctaacagtagtttaccaaataattcagcaactgaaac

SEQ ID NO: 285 - DNA, 36 bp, Francisella tularensis
  source 1..36: mol_type = unassigned DNA
atctacaacagtagaaattatttaaagttcttagac

SEQ ID NO: 286 - DNA, 36 bp, Eubacterium eligens
  source 1..36: mol_type = unassigned DNA
atctacaaagtagaaattatttaaggttattcaaac

SEQ ID NO: 287 - DNA, 36 bp, Francisella tularensis; identical to SEQ ID NO: 285
  source 1..36: mol_type = unassigned DNA

SEQ ID NO: 288 - DNA, 37 bp, Francisella tularensis; identical to SEQ ID NO: 284
  source 1..37: mol_type = unassigned DNA

SEQ ID NO: 289 - DNA, 36 bp, Francisella tularensis
  source 1..36: mol_type = unassigned DNA
gtctaagaactttaaataatttctactgttgtagat

SEQ ID NO: 290 - DNA, 37 bp, Francisella tularensis
  source 1..37: mol_type = unassigned DNA
gtttcagttgctgaattatttggtaaactactgttag

SEQ ID NO: 291 - DNA, 36 bp, Butyrivibrio hungatei
  source 1..36: mol_type = unassigned DNA
atctaatagtatagaaattaactttaagtcttagac

SEQ ID NO: 292 - DNA, 24 bp, Butyrivibrio hungatei
  source 1..24: mol_type = unassigned DNA
atctaataatatagaaattatctt

SEQ ID NO: 293 - DNA, 40 bp, Butyrivibrio hungatei
  source 1..40: mol_type = unassigned DNA
ctaatctaataatatagaaattatctttaagtcttagact

SEQ ID NO: 294 - DNA, 37 bp, Francisella tularensis; identical to SEQ ID NO: 284
  source 1..37: mol_type = unassigned DNA

SEQ ID NO: 295 - DNA, 36 bp, Francisella tularensis; identical to SEQ ID NO: 285
  source 1..36: mol_type = unassigned DNA

SEQ ID NO: 296 - DNA, 36 bp, unidentified
  misc_feature 1..36: note = Sequence from GenBank assembly GCA_001916615.1
  source 1..36: mol_type = unassigned DNA
gttaagtaacctaaaagaatttctacttgtgtagat

SEQ ID NO: 297 - DNA, 36 bp, unidentified
  misc_feature 1..36: note = Sequence from GenBank assembly GCA_002224245.2
  source 1..36: mol_type = unassigned DNA
gtctaacgacctttaaaatttctactatttgtagat

SEQ ID NO: 298 - DNA, 45 bp, unidentified
  misc_feature 1..45: note = Sequence from GenBank assembly GCA_002320275.1
  source 1..45: mol_type = unassigned DNA
tgtgtcatccgatacaaagatacaaatttgaaagcaattcacaac

SEQ ID NO: 299 - DNA, 37 bp, unidentified
  misc_feature 1..37: note = Sequence from GenBank assembly GCA_002320275.1
  source 1..37: mol_type = unassigned DNA
ggctacttaaagcctataatttctactatttgtagat

SEQ ID NO: 300 - DNA, 36 bp, unidentified
  misc_feature 1..36: note = Sequence from GenBank assembly GCA_002392345.1
  source 1..36: mol_type = unassigned DNA
atctacaatagtagaaattttattaaggtattaaac

SEQ ID NO: 301 - DNA, 36 bp, unidentified
  misc_feature 1..36: note = Sequence from GenBank assembly GCA_002483765.1
  source 1..36: mol_type = unassigned DNA
atctacaacagtagaaatttaattgagctcttcaac

SEQ ID NO: 302 - DNA, 36 bp, Eubacterium rectale
  source 1..36: mol_type = unassigned DNA
gttaagtaatatagaataatttctactgttgtagat

SEQ ID NO: 303 - DNA, 36 bp, unidentified
  misc_feature 1..36: note = Sequence from GenBank assembly GCA_900066075.1
  source 1..36: mol_type = unassigned DNA
gttaagtaatataaaagaatttctactattgtagat

SEQ ID NO: 304 - DNA, 36 bp, Coprococcus eutactus
  source 1..36: mol_type = unassigned DNA
atctacaacagtagaaattatttaaggttactcaac

SEQ ID NO: 305 - DNA, 37 bp, Eubacterium rectale
  source 1..37: mol_type = unassigned DNA
atctacaacagtagaaattattctatattacttaacc

SEQ ID NO: 306 - DNA, 36 bp, Lachnospira pectinoschiza
  source 1..36: mol_type = unassigned DNA
atctacacacagtagaaattatttaggttacttaac

SEQ ID NO: 307 - DNA, 36 bp, Moraxella ovis; identical to SEQ ID NO: 275
  source 1..36: mol_type = unassigned DNA

SEQ ID NO: 308 - DNA, 32 bp, Moraxella ovis; identical to SEQ ID NO: 278
  source 1..32: mol_type = unassigned DNA

SEQ ID NO: 309 - DNA, 36 bp, Leptospira sp.
  source 1..36: mol_type = unassigned DNA
atctacaacagtagaaatttataccttctcttagag

SEQ ID NO: 310 - DNA, 36 bp, Moraxella bovis; identical to SEQ ID NO: 275
  source 1..36: mol_type = unassigned DNA

SEQ ID NO: 311 - DNA, 28 bp, Moraxella bovis
  source 1..28: mol_type = unassigned DNA
tttctaagtcatctatgcgatgtggaat

SEQ ID NO: 312 - DNA, 29 bp, Moraxella bovis
  source 1..29: mol_type = unassigned DNA
ttttctaagtcatctatgcgatgtggaat

SEQ ID NO: 313 - DNA, 41 bp, Eubacterium rectale
  source 1..41: mol_type = unassigned DNA
agggttaagtaatatagaataatttctactgttgtagattt

SEQ ID NO: 314 - DNA, 36 bp, Eubacterium rectale; identical to SEQ ID NO: 302
  source 1..36: mol_type = unassigned DNA

SEQ ID NO: 315 - DNA, 36 bp, unidentified
  misc_feature 1..36: note = Sequence from GenBank assembly GCA_003491785.1
  source 1..36: mol_type = unassigned DNA
ggctagtatgcttcaataatttctactattgtagat

SEQ ID NO: 316 - DNA, 36 bp, Prevotella copri; identical to SEQ ID NO: 315
  source 1..36: mol_type = unassigned DNA

SEQ ID NO: 317 - DNA, 36 bp, Francisella philomiragia; identical to SEQ ID NO: 289
  source 1..36: mol_type = unassigned DNA

SEQ ID NO: 318 - DNA, 39 bp, Francisella tularensis
  source 1..39: mol_type = unassigned DNA
aaaatctacaacagtagaaattatttaaagttcttagac

SEQ ID NO: 319 - DNA, 36 bp, Francisella tularensis; identical to SEQ ID NO: 285
  source 1..36: mol_type = unassigned DNA

SEQ ID NO: 320 - DNA, 36 bp, Francisella tularensis; identical to SEQ ID NO: 289
  source 1..36: mol_type = unassigned DNA

SEQ ID NO: 321 - DNA, 36 bp, Francisella tularensis; identical to SEQ ID NO: 285
  source 1..36: mol_type = unassigned DNA

SEQ ID NO: 322 - DNA, 47 bp, unidentified
  misc_feature 1..47: note = Sequence from GenBank assembly GCA_000163695.1
  source 1..47: mol_type = unassigned DNA
gttgtgaattgctttcaaaagtttgtatctttgtagtctgaaacaac

SEQ ID NO: 323 - DNA, 36 bp, unidentified
  misc_feature 1..36: note = Sequence from GenBank assembly GCA_000163695.1
  source 1..36: mol_type = unassigned DNA
gtctataagacatttataatttctactattgtagat

SEQ ID NO: 324 - DNA, 37 bp, Francisella sp.; identical to SEQ ID NO: 284
  source 1..37: mol_type = unassigned DNA

SEQ ID NO: 325 - DNA, 36 bp, Francisella sp.; identical to SEQ ID NO: 285
  source 1..36: mol_type = unassigned DNA

SEQ ID NO: 326 - DNA, 32 bp, Eubacterium rectale
  source 1..32: mol_type = unassigned DNA
atttcaatccacgctcccacgagaggagcgac

SEQ ID NO: 327 - DNA, 29 bp, Eubacterium rectale
  source 1..29: mol_type = unassigned DNA
gtgtcaattcctcataggtaatgtatctc

SEQ ID NO: 328 - DNA, 29 bp, Eubacterium rectale
  source 1..29: mol_type = unassigned DNA
gtgtcaattccttataggtaatgtatatc

SEQ ID NO: 329 - DNA, 30 bp, Eubacterium rectale
  source 1..30: mol_type = unassigned DNA
gtgtcaattccttataggtaatgtatatca

SEQ ID NO: 330 - DNA, 31 bp, Eubacterium rectale
  source 1..31: mol_type = unassigned DNA
agtgtcaattccttataggtaatgtatatca

SEQ ID NO: 331 - DNA, 36 bp, Eubacterium rectale
  source 1..36: mol_type = unassigned DNA
gttgaaactgtaagcggaatgtctactagggtagat

SEQ ID NO: 332 - DNA, 19 bp, Eubacterium rectale
  source 1..19: mol_type = unassigned DNA
aatgtctactgaggtagat

SEQ ID NO: 333 - DNA, 36 bp, unidentified
  misc_feature 1..36: note = Sequence from GenBank assembly GCA_000222855.1
  source 1..36: mol_type = unassigned DNA
atctacaacagtagaaattattaaggtcttaattcc

SEQ ID NO: 334 - DNA, 36 bp, Flavobacterium branchiophilum
  source 1..36: mol_type = unassigned DNA
catatcgtgttttctaatctttaatcaaaccacaac

SEQ ID NO: 335 - DNA, 36 bp, Flavobacterium branchiophilum
  source 1..36: mol_type = unassigned DNA
gttgtaactgcccttattttgaagggtaaacacaac

SEQ ID NO: 336 - DNA, 36 bp, Flavobacterium branchiophilum
  source 1..36: mol_type = unassigned DNA
gtttaaaaccactttaaaatttctactattgtagat

SEQ ID NO: 337 - DNA, 35 bp, Butyrivibrio fibrisolvens
  source 1..35: mol_type = unassigned DNA
atctacaacagtagaaattatctataggttcttgg

SEQ ID NO: 338 - DNA, 36 bp, Prevotella brevis
  source 1..36: mol_type = unassigned DNA
atctacaatagtagaaatttaattagtcatttagac

SEQ ID NO: 339 - DNA, 36 bp, Francisella philomiragia; identical to SEQ ID NO: 289
  source 1..36: mol_type = unassigned DNA

SEQ ID NO: 340 - DNA, 36 bp, Francisella philomiragia; identical to SEQ ID NO: 285
  source 1..36: mol_type = unassigned DNA

SEQ ID NO: 341 - DNA, 37 bp, Francisella tularensis
  source 1..37: mol_type = unassigned DNA
gtctaagaactttaaataatttctactgttgtagata

SEQ ID NO: 342 - DNA, 37 bp, Francisella tularensis; identical to SEQ ID NO: 290
  source 1..37: mol_type = unassigned DNA

SEQ ID NO: 343 - DNA, 36 bp, Francisella tularensis; identical to SEQ ID NO: 289
  source 1..36: mol_type = unassigned DNA

SEQ ID NO: 344 - DNA, 37 bp, Francisella tularensis; identical to SEQ ID NO: 290
  source 1..37: mol_type = unassigned DNA

SEQ ID NO: 345 - DNA, 36 bp, Sneathia sp.
  source 1..36: mol_type = unassigned DNA
atttggaagcatattttaatttctactattgtagat

SEQ ID NO: 346 - DNA, 36 bp, Moraxella bovoculi; identical to SEQ ID NO: 275
  source 1..36: mol_type = unassigned DNA

SEQ ID NO: 347 - DNA, 36 bp, Moraxella bovoculi; identical to SEQ ID NO: 275
  source 1..36: mol_type = unassigned DNA

SEQ ID NO: 348 - DNA, 36 bp, Moraxella bovoculi; identical to SEQ ID NO: 275
  source 1..36: mol_type = unassigned DNA

SEQ ID NO: 349 - DNA, 36 bp, Moraxella bovoculi; identical to SEQ ID NO: 275
  source 1..36: mol_type = unassigned DNA

SEQ ID NO: 350 - DNA, 36 bp, Moraxella bovoculi; identical to SEQ ID NO: 275
  source 1..36: mol_type = unassigned DNA

SEQ ID NO: 351 - DNA, 36 bp, Moraxella bovoculi; identical to SEQ ID NO: 276
  source 1..36: mol_type = unassigned DNA

SEQ ID NO: 352 - DNA, 36 bp, Moraxella bovoculi; identical to SEQ ID NO: 277
  source 1..36: mol_type = unassigned DNA

SEQ ID NO: 353 - DNA, 32 bp, Moraxella bovoculi; identical to SEQ ID NO: 278
  source 1..32: mol_type = unassigned DNA

SEQ ID NO: 354 - DNA, 36 bp, Moraxella bovoculi
  source 1..36: mol_type = unassigned DNA
aagatcgcaccccatacgggtgcgtgtgttgaaact

SEQ ID NO: 355 - DNA, 36 bp, Moraxella bovoculi; identical to SEQ ID NO: 275
  source 1..36: mol_type = unassigned DNA

SEQ ID NO: 356 - DNA, 36 bp, Moraxella bovoculi; identical to SEQ ID NO: 276
  source 1..36: mol_type = unassigned DNA

SEQ ID NO: 357 - DNA, 36 bp, Moraxella bovoculi; identical to SEQ ID NO: 277
  source 1..36: mol_type = unassigned DNA

SEQ ID NO: 358 - DNA, 32 bp, Moraxella bovoculi; identical to SEQ ID NO: 278
  source 1..32: mol_type = unassigned DNA

SEQ ID NO: 359 - DNA, 40 bp, Moraxella bovoculi; identical to SEQ ID NO: 279
  source 1..40: mol_type = unassigned DNA

SEQ ID NO: 360 - DNA, 36 bp, Eubacterium rectale; identical to SEQ ID NO: 302
  source 1..36: mol_type = unassigned DNA

SEQ ID NO: 361 - DNA, 38 bp, Lachnospira sp.
  source 1..38: mol_type = unassigned DNA
aatctacaaagtagaaattatttaaggttattcaaact

SEQ ID NO: 362 - DNA, 36 bp, Lachnospira pectinoschiza; identical to SEQ ID NO: 306
  source 1..36: mol_type = unassigned DNA

SEQ ID NO: 363 - DNA, 36 bp, Moraxella lacunata
  source 1..36: mol_type = unassigned DNA
atctacaaacagtagaaatttaaaaggtcgttagac

SEQ ID NO: 364 - DNA, 36 bp, Moraxella lacunata; identical to SEQ ID NO: 275
  source 1..36: mol_type = unassigned DNA

SEQ ID NO: 365 - DNA, 36 bp, unidentified
  source 1..36: mol_type = unassigned DNA; note = Candidatus Sungbacteria
gtttaataccaccattcaatttctacttttgtagat

SEQ ID NO: 366 - DNA, 36 bp, unidentified
  source 1..36: mol_type = unassigned DNA; note = Candidatus Wildermuthbacteria
atctacaaaagtagaaattttatatgggtattagac

SEQ ID NO: 367 - DNA, 36 bp, unidentified; identical to SEQ ID NO: 366
  source 1..36: mol_type = unassigned DNA; note = Candidatus Wildermuthbacteria

SEQ ID NO: 368 - DNA, 38 bp, unidentified
  source 1..38: mol_type = unassigned DNA; note = Candidatus Gottesmanbacteria
aatctacaaaagtagaaatgtactatctgtatttgagc

SEQ ID NO: 369 - DNA, 36 bp, unidentified
  source 1..36: mol_type = unassigned DNA; note = Candidatus Gottesmanbacteria
atctacaaaagtagaaatgtactatctgtatttgag

SEQ ID NO: 370 - DNA, 37 bp, Francisella tularensis; identical to SEQ ID NO: 284
  source 1..37: mol_type = unassigned DNA

SEQ ID NO: 371 - DNA, 36 bp, Francisella tularensis; identical to SEQ ID NO: 285
  source 1..36: mol_type = unassigned DNA

SEQ ID NO: 372 - DNA, 37 bp, Francisella hispaniensis
  source 1..37: mol_type = unassigned DNA
ctaacagcagtatatcaaataatctagctactgaaac

SEQ ID NO: 373 - DNA, 36 bp, unidentified
  misc_feature 1..36: note = Sequence from GenBank assembly GCA_001916395.1
  source 1..36: mol_type = unassigned DNA
atctacaacagtagaaattattctatattacttaac

SEQ ID NO: 374 - DNA, 36 bp, unidentified
  misc_feature 1..36: note = Sequence from GenBank assembly GCA_001916455.1
  source 1..36: mol_type = unassigned DNA
atctacaatagtagaaattatttaggttacttaaac

SEQ ID NO: 375 - DNA, 36 bp, unidentified
  source 1..36: mol_type = unassigned DNA; note = Sedimentisphaera cyanobacteriorum
gttgtaacttgctttcattttcatatcgcttacaat

SEQ ID NO: 376 - DNA, 36 bp, unidentified
  source 1..36: mol_type = unassigned DNA; note = Sedimentisphaera cyanobacteriorum
atctacgacagtagaaattttataaggcctttagac

SEQ ID NO: 377 - DNA, 36 bp, unidentified
  source 1..36: mol_type = unassigned DNA; note = Limihaloglobus sulfuriphilus
ctctaagaggcatataaaatttctactgttgtagat

SEQ ID NO: 378 - DNA, 36 bp, Moraxella bovis; identical to SEQ ID NO: 363
  source 1..36: mol_type = unassigned DNA

SEQ ID NO: 379 - DNA, 36 bp, Moraxella lacunata; identical to SEQ ID NO: 275
  source 1..36: mol_type = unassigned DNA

SEQ ID NO: 380 - DNA, 34 bp, Moraxella lacunata
  source 1..34: mol_type = unassigned DNA
gtctaacgaccttttaaatttctactgtttgtag

SEQ ID NO: 381 - DNA, 37 bp, unidentified
  misc_feature 1..37: note = Sequence from GenBank assembly GCA_002297325.1
  source 1..37: mol_type = unassigned DNA
gtttaagacaaatacaaaatttctactgttgtagatt

SEQ ID NO: 382 - DNA, 36 bp, unidentified
  source 1..36: mol_type = unassigned DNA; note = Candidatus Pacebacteria
cttaaataggaataaaccatttctacttttgtagat

SEQ ID NO: 383 - DNA, 36 bp, unidentified
  source 1..36: mol_type = unassigned DNA; note = Candidatus Falkowbacteria
gttaaatatcgatattagatttctactttcgtagat

SEQ ID NO: 384 - DNA, 36 bp, unidentified
  misc_feature 1..36: note = Sequence from GenBank assembly GCA_002316175.1
  source 1..36: mol_type = unassigned DNA
atctacaatagtagaaatttcaaagacctaatagtc

SEQ ID NO: 385 - DNA, 35 bp, unidentified
  source 1..35: mol_type = unassigned DNA; note = Candidatus Magasanikbacteria
atctacaaaagtagaaattgaatatctatattaaa

SEQ ID NO: 386 - DNA, 37 bp, unidentified
  misc_feature 1..37: note = Sequence from GenBank assembly GCA_002333425.1
  source 1..37: mol_type = unassigned DNA
atctacaatagtagaaatttaaaacctcttatcgaga

SEQ ID NO: 387 - DNA, 36 bp, unidentified
  misc_feature 1..36: note = Sequence from GenBank assembly GCA_002342585.1
  source 1..36: mol_type = unassigned DNA
ggctataaagccaatttaatttctactattgtagat

SEQ ID NO: 388 - DNA, 36 bp, unidentified
  misc_feature 1..36: note = Sequence from GenBank assembly GCA_002350355.1
  source 1..36: mol_type = unassigned DNA
atctacaatagtagaaattacatcgacttattagcc

SEQ ID NO: 389 - DNA, 37 bp, unidentified
  misc_feature 1..37: note = Sequence from GenBank assembly GCA_002352545.1
  source 1..37: mol_type = unassigned DNA
catctaatccatatattagatttctacttttgtagat

SEQ ID NO: 390 - DNA, 37 bp, unidentified
  misc_feature 1..37: note = Sequence from GenBank assembly GCA_002352545.1
  source 1..37: mol_type = unassigned DNA
ctctaatccatatattagatttctacttttgtagatt

SEQ ID NO: 391 - DNA, 36 bp, unidentified
  misc_feature 1..36: note = Sequence from GenBank assembly GCA_002352545.1
  source 1..36: mol_type = unassigned DNA
ctctaatccatatattagatttctacttttgtagat

SEQ ID NO: 392 - DNA, 36 bp, unidentified
  misc_feature 1..36: note = Sequence from GenBank assembly GCA_002353655.1
  source 1..36: mol_type = unassigned DNA
atctacgatagtagaaattactgaggtcttacagac

SEQ ID NO: 393 - DNA, 36 bp, unidentified
  misc_feature 1..36: note = Sequence from GenBank assembly GCA_002367195.1
  source 1..36: mol_type = unassigned DNA
atctacaaaagtagaaatttgatatagggattagac

SEQ ID NO: 394 - DNA, 37 bp, unidentified
  misc_feature 1..37: note = Sequence from GenBank assembly GCA_002368815.1
  source 1..37: mol_type = unassigned DNA
aatctacaatagtagaaattaattatggcttatagcc

SEQ ID NO: 395 - DNA, 36 bp, unidentified
  misc_feature 1..36: note = Sequence from GenBank assembly GCA_002371595.1
  source 1..36: mol_type = unassigned DNA
gtttggtacctttattaatttctactaagtgtagat

SEQ ID NO: 396 - DNA, 36 bp, unidentified
  misc_feature 1..36: note = Sequence from GenBank assembly GCA_002371615.1
  source 1..36: mol_type = unassigned DNA
atctacaatagtagaaattttctttaacctctaggc

SEQ ID NO: 397 - DNA, 36 bp, unidentified
  misc_feature 1..36: note = Sequence from GenBank assembly GCA_002372885.1
  source 1..36: mol_type = unassigned DNA
atctacaacagtagaaatttaattagtaggtcaaac

SEQ ID NO: 398 - DNA, 37 bp, unidentified
  misc_feature 1..37: note = Sequence from GenBank assembly GCA_002372885.1
  source 1..37: mol_type = unassigned DNA
atctacaacagtagaaatttaattagtaggtcaaacc

SEQ ID NO: 399 - DNA, 36 bp, unidentified
  misc_feature 1..36: note = Sequence from GenBank assembly GCA_002373205.1
  source 1..36: mol_type = unassigned DNA
gttttggctttataaagaatttctactgttgtagat

SEQ ID NO: 400 - DNA, 37 bp, unidentified
  misc_feature 1..37: note = Sequence from GenBank assembly GCA_002375165.1
  source 1..37: mol_type = unassigned DNA
atctacaatagtagaaattttatatgtattcacacct

SEQ ID NO: 401 - DNA, 36 bp, Anaerovibrio lipolyticus
  source 1..36: mol_type = unassigned DNA
atctacaacagtagaaatttatatgaggttctagac

SEQ ID NO: 402 - DNA, 37 bp, unidentified; identical to SEQ ID NO: 400
  misc_feature 1..37: note = Sequence from GenBank assembly GCA_002373415.1
  source 1..37: mol_type = unassigned DNA

SEQ ID NO: 403 - DNA, 36 bp, unidentified
  misc_feature 1..36: note = Sequence from GenBank assembly GCA_002377945.1
  source 1..36: mol_type = unassigned DNA
atctacacttagtagaaattgattaggtcgttagac

SEQ ID NO: 404 - DNA, 36 bp, unidentified
  misc_feature 1..36: note = Sequence from GenBank assembly GCA_002382975.1
  source 1..36: mol_type = unassigned DNA
gcctagaagcttcataaaatttctactcttgtagat

SEQ ID NO: 405 - DNA, 36 bp, unidentified
  misc_feature 1..36: note = Sequence from GenBank assembly GCA_002392725.1
  source 1..36: mol_type = unassigned DNA
atctacaatagtagaaattaaaatggctttatagcc

SEQ ID NO: 406 - DNA, 37 bp, unidentified
  misc_feature 1..37: note = Sequence from GenBank assembly GCA_002392725.1
  source 1..37: mol_type = unassigned DNA
tatctacaatagtagaaattaaaatggctttatagcc

SEQ ID NO: 407 - DNA, 36 bp, unidentified
  misc_feature 1..36: note = Sequence from GenBank assembly GCA_002394685.1
  source 1..36: mol_type = unassigned DNA
atctacaacagtagaaatttaattagtagttcaaac

SEQ ID NO: 408 - DNA, 36 bp, unidentified
  misc_feature 1..36: note = Sequence from GenBank assembly GCA_002395825.1
  source 1..36: mol_type = unassigned DNA
atctacgatagtagaaattatatatgtatttacacc

SEQ ID NO: 409 - DNA, 36 bp, unidentified
  misc_feature 1..36: note = Sequence from GenBank assembly GCA_002395965.1
  source 1..36: mol_type = unassigned DNA
gtctaatccactcgattaatttctactattgtagat

SEQ ID NO: 410 - DNA, 36 bp, unidentified
  misc_feature 1..36: note = Sequence from GenBank assembly GCA_002395965.1
  source 1..36: mol_type = unassigned DNA
gtctaatccactcaattaatttctactattgtagat

SEQ ID NO: 411 - DNA, 37 bp, unidentified
  misc_feature 1..37: note = Sequence from GenBank assembly GCA_002394285.1
  source 1..37: mol_type = unassigned DNA
agttcatacatgatattaaatttctactgttgtagat

SEQ ID NO: 412 - DNA, 42 bp, unidentified
  misc_feature 1..42: note = Sequence from GenBank assembly GCA_002412935.1
  source 1..42: mol_type = unassigned DNA
tcgaagactaaaacccccaacaaatttctacttttgtagata

SEQ ID NO: 413 - DNA, 37 bp, unidentified
  misc_feature 1..37: note = Sequence from GenBank assembly GCA_002412935.1
  source 1..37: mol_type = unassigned DNA
gactaaaacccccaacaaatttctacttttgtagata

SEQ ID NO: 414 - DNA, 38 bp, unidentified
  misc_feature 1..38: note = Sequence from GenBank assembly GCA_002412935.1
  source 1..38: mol_type = unassigned DNA
tgactaaaacccccaacaaatttctacttttgtagatt

SEQ ID NO: 415 - DNA, 37 bp, unidentified
  misc_feature 1..37: note = Sequence from GenBank assembly GCA_002418835.1
  source 1..37: mol_type = unassigned DNA
atctacaacagtagaaatttaatattatctatagacc

SEQ ID NO: 416 - DNA, 36 bp, unidentified
  misc_feature 1..36: note = Sequence from GenBank assembly GCA_002424135.1
  source 1..36: mol_type = unassigned DNA
gtctataagactcatttaatttctactattgtagat

SEQ ID NO: 417 - DNA, 45 bp, unidentified
  misc_feature 1..45: note = Sequence from GenBank assembly GCA_002424135.1
  source 1..45: mol_type = unassigned DNA
gttgttagataccgcaaaaatacaaatttaaaagcaattcacaac

SEQ ID NO: 418 - DNA, 51 bp, unidentified
  misc_feature 1..51: note = Sequence from GenBank assembly GCA_002424135.1
  source 1..51: mol_type = unassigned DNA
gaatcgttgttagataccgcaaaaatacaaatttaaaagcaattcacaaca

SEQ ID NO: 419 - DNA, 38 bp, unidentified
  misc_feature 1..38: note = Sequence from GenBank assembly GCA_002449305.1
  source 1..38: mol_type = unassigned DNA
atctacaacagtagaaattttgtatttgtcttaaacaa

SEQ ID NO: 420 - DNA, 36 bp, unidentified
  misc_feature 1..36: note = Sequence from GenBank assembly GCA_002449305.1
  source 1..36: mol_type = unassigned DNA
atctacaacagtagaaattttgtatttgtcttaaac

SEQ ID NO: 421 - DNA, 37 bp, unidentified; identical to SEQ ID NO: 381
  misc_feature 1..37: note = Sequence from GenBank assembly GCA_002449425.1
  source 1..37: mol_type = unassigned DNA

SEQ ID NO: 422 - DNA, 37 bp, unidentified
  misc_feature 1..37: note = Sequence from GenBank assembly GCA_002455375.1
  source 1..37: mol_type = unassigned DNA
ggcaaataagccaatcaaatttctactattgtagatt

SEQ ID NO: 423 - DNA, 37 bp, unidentified
  misc_feature 1..37: note = Sequence from GenBank assembly GCA_002481865.1
  source 1..37: mol_type = unassigned DNA
gtctgtaagacctcagtaatttctactatcgtagatc

SEQ ID NO: 424 - DNA, 36 bp, unidentified
  misc_feature 1..36: note = Sequence from GenBank assembly GCA_002633275.1
  source 1..36: mol_type = unassigned DNA
gtctataagacgaactaaatttctactattgtagat

SEQ ID NO: 425 - DNA, 36 bp, unidentified
  source 1..36: mol_type = unassigned DNA; note = Candidatus Moranbacteria
atctacaacagtagaaatcttatagacgtattagac

SEQ ID NO: 426 - DNA, 37 bp, unidentified
  source 1..37: mol_type = unassigned DNA; note = Candidatus Moranbacteria
gatctacaacagtagaaatcttatagacgtattagac

SEQ ID NO: 427 - DNA, 36 bp, unidentified; identical to SEQ ID NO: 369
  source 1..36: mol_type = unassigned DNA; note = Candidatus Gottesmanbacteria

SEQ ID NO: 428 - DNA, 36 bp, unidentified
  source 1..36: mol_type = unassigned DNA; note = Candidatus Roizmanbacteria
atctacaaaagtagaaattggctatcaattgtagag

SEQ ID NO: 429 - DNA, 39 bp, unidentified
  source 1..39: mol_type = unassigned DNA; note = Candidatus Roizmanbacteria
atatctacaaaagtagaaattggctatcaattgtagagt

SEQ ID NO: 430 - DNA, 36 bp, unidentified; identical to SEQ ID NO: 369
  source 1..36: mol_type = unassigned DNA; note = Candidatus Gottesmanbacteria

SEQ ID NO: 431 - DNA, 36 bp, unidentified
  source 1..36: mol_type = unassigned DNA; note = Candidatus Roizmanbacteria
gtttaatccttatagtagatttctacttttgtagat

SEQ ID NO: 432 - DNA, 36 bp, unidentified
  source 1..36: mol_type = unassigned DNA; note = Candidatus Falkowbacteria
gtttaaatccgatataagatttctacttttgtagat

SEQ ID NO: 433 - DNA, 36 bp, unidentified; identical to SEQ ID NO: 393
  source 1..36: mol_type = unassigned DNA; note = Candidatus Yonathbacteria

SEQ ID NO: 434 - DNA, 38 bp, unidentified
  source 1..38: mol_type = unassigned DNA; note = Candidatus Roizmanbacteria
actctacaactgataagtaatttctacttttgtagatt

SEQ ID NO: 435 - DNA, 36 bp, unidentified
  source 1..36: mol_type = unassigned DNA; note = Candidatus Roizmanbacteria
ctctacaactgataagtaatttctacttttgtagat

SEQ ID NO: 436 - DNA, 36 bp, unidentified; identical to SEQ ID NO: 393
  source 1..36: mol_type = unassigned DNA; note = Candidatus Yonathbacteria

SEQ ID NO: 437 - DNA, 36 bp, unidentified
  source 1..36: mol_type = unassigned DNA; note = Candidatus Yonathbacteria
gtctaatccctatatcaaatttctacttttgtagat

SEQ ID NO: 438 - DNA, 35 bp, unidentified
  source 1..35: mol_type = unassigned DNA; note = Candidatus Uhrbacteria
gtctaatagacctattaaatttctacttttgtaga

SEQ ID NO: 439 - DNA, 36 bp, unidentified
  source 1..36: mol_type = unassigned DNA; note = Candidatus Uhrbacteria
atctacaaaagtagaaatttaataggtctattagac

SEQ ID NO: 440 - DNA, 36 bp, unidentified
  source 1..36: mol_type = unassigned DNA; note = Candidatus Ryanbacteria
gtctaatacctctataaaatttctacttttgtagat

SEQ ID NO: 441 - DNA, 36 bp, unidentified
  source 1..36: mol_type = unassigned DNA; note = Candidatus Uhrbacteria
gtctaatagacctattaaatttctacttttgtagat

SEQ ID NO: 442 - DNA, 36 bp, unidentified; identical to SEQ ID NO: 369
  source 1..36: mol_type = unassigned DNA; note = Candidatus Gottesmanbacteria

SEQ ID NO: 443 - DNA, 36 bp, unidentified
  misc_feature 1..36: note = Sequence from GenBank assembly GCA_002842495.1
  source 1..36: mol_type = unassigned DNA
gtctgaaagacacaattaatttctactattgtagat

SEQ ID NO: 444 - DNA, 36 bp, unidentified
  misc_feature 1..36: note = Sequence from GenBank assembly GCA_002842495.1
  source 1..36: mol_type = unassigned DNA
gtctgaaagacaaactaaatttctactattgtagat

SEQ ID NO: 445 - DNA, 19 bp, unidentified
  misc_feature 1..19: note = Sequence from GenBank assembly GCA_002842495.1
  source 1..19: mol_type = unassigned DNA
aatttctactattgtagat

SEQ ID NO: 446 - DNA, 36 bp, unidentified
  misc_feature 1..36: note = Sequence from GenBank assembly GCA_002842495.1
  source 1..36: mol_type = unassigned DNA
gtctgaaagacaaacaaaatttctactattgtagat

SEQ ID NO: 447 - DNA, 21 bp, unidentified
  misc_feature 1..21: note = Sequence from GenBank assembly GCA_002842495.1
  source 1..21: mol_type = unassigned DNA
ataatttctactattgtagat

SEQ ID NO: 448 - DNA, 36 bp, Acinetobacter sp.
  source 1..36: mol_type = unassigned DNA
ggctaacagccttttaaatttctactgtgtgtagat

SEQ ID NO: 449 - DNA, 36 bp, Francisella tularensis; identical to SEQ ID NO: 289
  source 1..36: mol_type = unassigned DNA

SEQ ID NO: 450 - DNA, 37 bp, Francisella tularensis; identical to SEQ ID NO: 290
  source 1..37: mol_type = unassigned DNA

SEQ ID NO: 451 - DNA, 36 bp, unidentified
  source 1..36: mol_type = unassigned DNA; note = Candidatus Saccharibacteria
gtctaatacctacatccaatttctacttcggtagat

SEQ ID NO: 452 - DNA, 30 bp, unidentified
  misc_feature 1..30: note = Sequence from GenBank assembly GCA_003063625.1
  source 1..30: mol_type = unassigned DNA
tgttcactgccgcacaggcagcttagaaat

SEQ ID NO: 453 - DNA, 28 bp, unidentified
  misc_feature 1..28: note = Sequence from GenBank assembly GCA_003063625.1
  source 1..28: mol_type = unassigned DNA
gttcactgccgcacaggcagcttagaaa

SEQ ID NO: 454 - DNA, 28 bp, unidentified
  misc_feature 1..28: note = Sequence from GenBank assembly GCA_003063625.1
  source 1..28: mol_type = unassigned DNA
gttcactgccgtacaggcagcttagaaa

SEQ ID NO: 455 - DNA, 29 bp, unidentified
  misc_feature 1..29: note = Sequence from GenBank assembly GCA_003063625.1
  source 1..29: mol_type = unassigned DNA
agttcactgccgcacaggcagcttagaaa

SEQ ID NO: 456 - DNA, 36 bp, unidentified
  misc_feature 1..36: note = Sequence from GenBank assembly GCA_003063625.1
  source 1..36: mol_type = unassigned DNA
atctacaacagtagaaatttaagctaaggcttagac

SEQ ID NO: 457 - DNA, 28 bp, unidentified
  misc_feature 1..28: note = Sequence from GenBank assembly GCA_003063625.1
  source 1..28: mol_type = unassigned DNA
cttccatatcacctacgtaaccgtgaac

SEQ ID NO: 458 - DNA, 36 bp, Bacteroides galacturonicus; identical to SEQ ID NO: 374
  source 1..36: mol_type = unassigned DNA

SEQ ID NO: 459 - DNA, 37 bp, unidentified
  source 1..37: mol_type = unassigned DNA; note = Phycisphaerales bacterium
atctacaatagtagaaattatacagctgccttaaaca

SEQ ID NO: 460 - DNA, 36 bp, Eubacterium rectale; identical to SEQ ID NO: 373
  source 1..36: mol_type = unassigned DNA

SEQ ID NO: 461 - DNA, 36 bp, Eubacterium rectale; identical to SEQ ID NO: 302
  source 1..36: mol_type = unassigned DNA

SEQ ID NO: 462 - DNA, 36 bp, Phocaeicola sp.
  source 1..36: mol_type = unassigned DNA
atctacacatagtagaaattacttagtcatatagac

SEQ ID NO: 463 - DNA, 36 bp, Eubacterium rectale; identical to SEQ ID NO: 302
  source 1..36: mol_type = unassigned DNA

SEQ ID NO: 464 - DNA, 36 bp, Eubacterium rectale; identical to SEQ ID NO: 302
  source 1..36: mol_type = unassigned DNA

SEQ ID NO: 465 - DNA, 36 bp, Eubacterium rectale; identical to SEQ ID NO: 302
  source 1..36: mol_type = unassigned DNA

SEQ ID NO: 466 - DNA, 36 bp, Eubacterium rectale; identical to SEQ ID NO: 373
  source 1..36: mol_type = unassigned DNA

SEQ ID NO: 467 - DNA, 36 bp, unidentified
  source 1..36: mol_type = unassigned DNA; note = Deltaproteobacteria bacterium
atctacaatagtagaaattatgagaagcttctagac

SEQ ID NO: 468 - DNA, 36 bp, unidentified
  misc_feature 1..36: note = Sequence from GenBank assembly GCA_003451515.1
  source 1..36: mol_type = unassigned DNA
gtttgaataaccttaaataatttctactttgtagat

SEQ ID NO: 469 - DNA, 36 bp, unidentified
  misc_feature 1..36: note = Sequence from GenBank assembly GCA_003457135.1
  source 1..36: mol_type = unassigned DNA
gtctggccccaaattttaatttctactgttgtagat

SEQ ID NO: 470 - DNA, 36 bp, Phocaeicola sp.
  source 1..36: mol_type = unassigned DNA
atctacacatagtagaaattactttgtcatatagac

SEQ ID NO: 471 - DNA, 36 bp, Phocaeicola sp.; identical to SEQ ID NO: 470
  source 1..36: mol_type = unassigned DNA

SEQ ID NO: 472 - DNA, 36 bp, Eubacterium rectale; identical to SEQ ID NO: 302
  source 1..36: mol_type = unassigned DNA

SEQ ID NO: 473 - DNA, 36 bp, Eubacterium rectale; identical to SEQ ID NO: 302
  source 1..36: mol_type = unassigned DNA

SEQ ID NO: 474 - DNA, 36 bp, Eubacterium rectale; identical to SEQ ID NO: 373
  source 1..36: mol_type = unassigned DNA

SEQ ID NO: 475 - DNA, 36 bp, Eubacterium rectale; identical to SEQ ID NO: 373
  source 1..36: mol_type = unassigned DNA

SEQ ID NO: 476 - DNA, 36 bp, Eubacterium rectale; identical to SEQ ID NO: 373
  source 1..36: mol_type = unassigned DNA

SEQ ID NO: 477 - DNA, 36 bp, Eubacterium rectale; identical to SEQ ID NO: 302
  source 1..36: mol_type = unassigned DNA

SEQ ID NO: 478 - DNA, 36 bp, unidentified
  misc_feature 1..36: note = Sequence from GenBank assembly GCA_003460445.1
  source 1..36: mol_type = unassigned DNA
gtttaataaccctatataatttctactattgtagat

SEQ ID NO: 479 - DNA, 36 bp, unidentified; identical to SEQ ID NO: 478
  misc_feature 1..36: note = Sequence from GenBank assembly GCA_003461945.1
  source 1..36: mol_type = unassigned DNA

SEQ ID NO: 480 - DNA, 36 bp, unidentified; identical to SEQ ID NO: 478
  misc_feature 1..36: note = Sequence from GenBank assembly GCA_003462185.1
  source 1..36: mol_type = unassigned DNA

SEQ ID NO: 481 - DNA, 40 bp, unidentified
  misc_feature 1..40: note = Sequence from GenBank assembly GCA_003462185.1
  source 1..40: mol_type = unassigned DNA
ttagttttactaccttatagatttacactattctcaaacc

SEQ ID NO: 482 - DNA, 36 bp, unidentified
  misc_feature 1..36: note = Sequence from GenBank assembly GCA_003461545.1
  source 1..36: mol_type = unassigned DNA
atctacaacagtagaaattactataggttacttaac

SEQ ID NO: 483 - DNA, 36 bp, Eubacterium rectale; identical to SEQ ID NO: 302
  source 1..36: mol_type = unassigned DNA

SEQ ID NO: 484 - DNA, 41 bp, Eubacterium rectale
  source 1..41: mol_type = unassigned DNA
cgttaagtaatatagaataatttctactgttgtagataagt

SEQ ID NO: 485 - DNA, 36 bp, Eubacterium rectale; identical to SEQ ID NO: 302
  source 1..36: mol_type = unassigned DNA

SEQ ID NO: 486 - DNA, 36 bp, Eubacterium ventriosum
  source 1..36: mol_type = unassigned DNA
gttgaataaccttaaagaatttctactagtgtagat

SEQ ID NO: 487 - DNA, 36 bp, Eubacterium ventriosum
  source 1..36: mol_type = unassigned DNA
atctacactagtagaaattctttaaggttattcaac

SEQ ID NO: 488 - DNA, 38 bp, Eubacterium ventriosum
  source 1..38: mol_type = unassigned DNA
aaatctacactagtagaaattctttaaggctattcaac

SEQ ID NO: 489 - DNA, 36 bp, Eubacterium ventriosum
  source 1..36: mol_type = unassigned DNA
atctacactagtagaaattctttaaggctattcaac

SEQ ID NO: 490 - DNA, 36 bp, Eubacterium ventriosum; identical to SEQ ID NO: 487
  source 1..36: mol_type = unassigned DNA

SEQ ID NO: 491 - DNA, 36 bp, Eubacterium ventriosum; identical to SEQ ID NO: 489
  source 1..36: mol_type = unassigned DNA

SEQ ID NO: 492 - DNA, 36 bp, Eubacterium rectale; identical to SEQ ID NO: 302
  source 1..36: mol_type = unassigned DNA

SEQ ID NO: 493 - DNA, 36 bp, Phocaeicola sp.
  source 1..36: mol_type = unassigned DNA
gtctatatgactaagtaatttctactatgtgtagat

SEQ ID NO: 494 - DNA, 36 bp, Phocaeicola sp.; identical to SEQ ID NO: 493
  source 1..36: mol_type = unassigned DNA

SEQ ID NO: 495 - DNA, 36 bp, Eubacterium rectale; identical to SEQ ID NO: 373
  source 1..36: mol_type = unassigned DNA

SEQ ID NO: 496 - DNA, 36 bp, Eubacterium ventriosum; identical to SEQ ID NO: 489
  source 1..36: mol_type = unassigned DNA

SEQ ID NO: 497 - DNA, 36 bp, Eubacterium rectale; identical to SEQ ID NO: 373
  source 1..36: mol_type = unassigned DNA

SEQ ID NO: 498 - DNA, 37 bp, Eubacterium ventriosum
  source 1..37: mol_type = unassigned DNA
gttgaataaccttaaagaatttctactagtgtagata

SEQ ID NO: 499 - DNA, 36 bp, Eubacterium ventriosum; identical to SEQ ID NO: 486
  source 1..36: mol_type = unassigned DNA

SEQ ID NO: 500 - DNA, 36 bp, unidentified
  misc_feature 1..36: note = Sequence from GenBank assembly GCA_003476125.1
  source 1..36: mol_type = unassigned DNA
atctgcaaaagcagaaattttcttgtgttactcaac

SEQ ID NO: 501 - DNA, 36 bp, unidentified
  misc_feature 1..36: note = Sequence from GenBank assembly GCA_003477365.1
  source 1..36: mol_type = unassigned DNA
gaataataatccctttaaatttctactattgtagat

SEQ ID NO: 502 - DNA, 40 bp, unidentified
  misc_feature 1..40: note = Sequence from GenBank assembly GCA_003478095.1
  source 1..40: mol_type = unassigned DNA
atctacactagtagaaattctttcttattatttaaccaaa

SEQ ID NO: 503 - DNA, 41 bp, unidentified
  misc_feature 1..41: note = Sequence from GenBank assembly GCA_003480125.1
  source 1..41: mol_type = unassigned DNA
atctacaacagtagaaattatttaaggttattcaaccaaat

SEQ ID NO: 504 - DNA, 36 bp, unidentified; identical to SEQ ID NO: 306
  misc_feature 1..36: note = Sequence from GenBank assembly GCA_003483025.1
  source 1..36: mol_type = unassigned DNA

SEQ ID NO: 505 - DNA, 36 bp, unidentified
  misc_feature 1..36: note = Sequence from GenBank assembly GCA_003485785.1
  source 1..36: mol_type = unassigned DNA
atctacaaaagtagaaatcttttatatgtattagga

SEQ ID NO: 506 - DNA, 36 bp, unidentified; identical to SEQ ID NO: 500
  misc_feature 1..36: note = Sequence from GenBank assembly GCA_003486385.1
  source 1..36: mol_type = unassigned DNA

SEQ ID NO: 507 - DNA, 36 bp, unidentified
  misc_feature 1..36: note = Sequence from GenBank assembly GCA_003486865.1
  source 1..36: mol_type = unassigned DNA
atctacaatagtagaaattatatagggttattaaac

SEQ ID NO: 508 - DNA, 36 bp, unidentified
  misc_feature 1..36: note = Sequence from GenBank assembly GCA_003487145.1
  source 1..36: mol_type = unassigned DNA
gttgagtaaccttaaataatttctactgttgtagat

SEQ ID NO: 509 - DNA, 36 bp, unidentified
  misc_feature 1..36: note = Sequence from GenBank assembly GCA_003487405.1
  source 1..36: mol_type = unassigned DNA
gttgagtaacacaagaaaatttctgcttttgcagat

SEQ ID NO: 510 - DNA, 17 bp, unidentified
  misc_feature 1..17: note = Sequence from GenBank assembly GCA_003487615.1
  source 1..17: mol_type = unassigned DNA
tttgggtagagatttcc

SEQ ID NO: 511 - DNA, 36 bp, unidentified
  misc_feature 1..36: note = Sequence from GenBank assembly GCA_003499665.1
  source 1..36: mol_type = unassigned DNA
atctacaatagtagaaatttttaaaaacgatttgac

SEQ ID NO: 512 - DNA, 36 bp, unidentified; identical to SEQ ID NO: 508
  misc_feature 1..36: note = Sequence from GenBank assembly GCA_003479365.1
  source 1..36: mol_type = unassigned DNA

SEQ ID NO: 513 - DNA, 39 bp, unidentified
  misc_feature 1..39: note = Sequence from GenBank assembly GCA_003479365.1
  source 1..39: mol_type = unassigned DNA
tatgttgagtaaccttaaataatttctactgttgtagat

SEQ ID NO: 514 - DNA, 36 bp, unidentified
  source 1..36: mol_type = unassigned DNA; note = Candidatus Falkowbacteria
gtctaatatcaatattcaatttctactttcgtagat

SEQ ID NO: 515 - DNA, 36 bp, unidentified
  misc_feature 1..36: note = Sequence from GenBank assembly GCA_003526365.1
  source 1..36: mol_type = unassigned DNA
gttaagtaatatggaataatttctactgttgtagat

SEQ ID NO: 516 - DNA, 37 bp, unidentified
  misc_feature 1..37: note = Sequence from GenBank assembly GCA_003526365.1
  source 1..37: mol_type = unassigned DNA
tgttaagtaatatggaataatttctactgttgtagat

SEQ ID NO: 517 - DNA, 37 bp, unidentified
  misc_feature 1..37: note = Sequence from GenBank assembly GCA_003526365.1
  source 1..37: mol_type = unassigned DNA
gttaagtaatatggaataatttctactgttgtagatt

SEQ ID NO: 518 - DNA, 36 bp, unidentified
  misc_feature 1..36: note = Sequence from GenBank assembly GCA_003531185.1
  source 1..36: mol_type = unassigned DNA
gttgaataaccttaaataatttctactgttgtagat

SEQ ID NO: 519 - DNA, 36 bp, unidentified; identical to SEQ ID NO: 306
  misc_feature 1..36: note = Sequence from GenBank assembly GCA_003531445.1
  source 1..36: mol_type = unassigned DNA

SEQ ID NO: 520 - DNA, 33 bp, unidentified
  misc_feature 1..33: note = Sequence from GenBank assembly GCA_003540585.1
  source 1..33: mol_type = unassigned DNA
gttaagtaacctaaataatttctactgtgtgta

SEQ ID NO: 521 - DNA, 36 bp, unidentified
  misc_feature 1..36: note = Sequence from GenBank assembly GCA_003584705.1
  source 1..36: mol_type = unassigned DNA
gttaaataataagaaagaatttctactagtgtagat

SEQ ID NO: 522 - DNA, 36 bp, unidentified; identical to SEQ ID NO: 482
  misc_feature 1..36: note = Sequence from GenBank assembly GCA_003603115.1
  source 1..36: mol_type = unassigned DNA

SEQ ID NO: 523 - DNA, 35 bp, unidentified
  misc_feature 1..35: note = Sequence from GenBank assembly GCA_003603525.1
  source 1..35: mol_type = unassigned DNA
gtcaaaagacctttttaatttctactcttgtagat

SEQ ID NO: 524 - DNA, 36 bp, Porphyromonas crevioricanis
  source 1..36: mol_type = unassigned DNA
gtctaggtactctctttaatttctactattgtagat

SEQ ID NO: 525 - DNA, 30 bp, Porphyromonas crevioricanis
  source 1..30: mol_type = unassigned DNA
ctctcaatcgcaccatattggaattgaaac

SEQ ID NO: 526 - DNA, 29 bp, Porphyromonas crevioricanis
  source 1..29: mol_type = unassigned DNA
ctctcaatcgcaccatattggaattgaaa

SEQ ID NO: 527 - DNA, 36 bp, Pseudobutyrivibrio xylanivorans
  source 1..36: mol_type = unassigned DNA
atctacaatagtagaaattatttaaaggttctaagc

SEQ ID NO: 528 - DNA, 40 bp, Pseudobutyrivibrio xylanivorans
  source 1..40: mol_type = unassigned DNA
tgtatctacaatagtagaaattatttaaaggttctaagct

SEQ ID NO: 529 - DNA, 33 bp, unidentified
  misc_feature 1..33: note = Sequence from GenBank assembly GCA_005601135.1
  source 1..33: mol_type = unassigned DNA
atttcaatccacaccacccatgtgggtggtgac

SEQ ID NO: 530 - DNA, 36 bp, unidentified
  misc_feature 1..36: note = Sequence from GenBank assembly GCA_005601135.1
  source 1..36: mol_type = unassigned DNA
attatatcataccaagaataattagggaactataac

SEQ ID NO: 531 - DNA, 36 bp, unidentified
  misc_feature 1..36: note = Sequence from GenBank assembly GCA_005601135.1
  source 1..36: mol_type = unassigned DNA
gtttgagagtagtgtaatttcataaggtattaaaac

SEQ ID NO: 532 - DNA, 36 bp, unidentified
  misc_feature 1..36: note = Sequence from GenBank assembly GCA_005601135.1
  source 1..36: mol_type = unassigned DNA
gtttaatcaacccttagaatttctactattgtagat

SEQ ID NO: 533 - DNA, 46 bp, unidentified
  misc_feature 1..46: note = Sequence from GenBank assembly GCA_006088815.1
  source 1..46: mol_type = unassigned DNA
gttgcgacgtatcgcgaatttaaaaattttgaaagcaattcacaac

SEQ ID NO: 534 - DNA, 40 bp, unidentified
  misc_feature 1..40: note = Sequence from GenBank assembly GCA_009676955.1
  source 1..40: mol_type = unassigned DNA
caatctacacatagtagaaattataggctttaagtagccc

SEQ ID NO: 535 - DNA, 37 bp, unidentified
  misc_feature 1..37: note = Sequence from GenBank assembly GCA_009676955.1
  source 1..37: mol_type = unassigned DNA
atctacacatagtagaaattacaggctttatgtagcc

SEQ ID NO: 536 - DNA, 37 bp, unidentified
  misc_feature 1..37: note = Sequence from GenBank assembly GCA_009676955.1
  source 1..37: mol_type = unassigned DNA
gtcttaatccttgttgtagtggaatatggtctctgac

SEQ ID NO: 537 - DNA, 36 bp, unidentified
  misc_feature 1..36: note = Sequence from GenBank assembly GCA_009775705.1
  source 1..36: mol_type = unassigned DNA
ggctataagccttagataatttctactattgtagat

SEQ ID NO: 538 - DNA, 39 bp, unidentified
  misc_feature 1..39: note = Sequence from GenBank assembly GCA_900066565.1
  source 1..39: mol_type = unassigned DNA
aatctacactagtagaaattttttcttattatttaacac

SEQ ID NO: 539 - DNA, 36 bp, Prevotella ruminicola
  source 1..36: mol_type = unassigned DNA
ggtataaaccatagtaaaatttctgctattgcagat

SEQ ID NO: 540 - DNA, 47 bp, Prevotella sp.
  source 1..47: mol_type = unassigned DNA
gttgtgatttgctcgaaaaatcgtatctttgcaatataagaaacaac

SEQ ID NO: 541 - DNA, 36 bp, Prevotella sp.
  source 1..36: mol_type = unassigned DNA
atctacacaagtagaaattaattaagtcttatagac

SEQ ID NO: 542 - DNA, 37 bp, Porphyromonas crevioricanis
  source 1..37: mol_type = unassigned DNA
ggtctaggtactctctttaatttctactattgtagat

SEQ ID NO: 543 - DNA, 37 bp, unidentified
  misc_feature 1..37: note = Sequence from GenBank assembly GCA_900315115.1
  source 1..37: mol_type = unassigned DNA
gctgtaagagcatatagaatttctactattgtagatc

SEQ ID NO: 544 - DNA, 30 bp, unidentified
  misc_feature 1..30: note = Sequence from GenBank assembly GCA_900315765.1
  source 1..30: mol_type = unassigned DNA
atctgcaatagcagaaattttactatggtt

SEQ ID NO: 545 - DNA, 36 bp, unidentified
  misc_feature 1..36: note = Sequence from GenBank assembly GCA_900316295.1
  source 1..36: mol_type = unassigned DNA
atctacgatagtagaaattaacttggctttatagcc

SEQ ID NO: 546 - DNA, 36 bp, unidentified
  misc_feature 1..36: note = Sequence from GenBank assembly GCA_900317695.1
  source 1..36: mol_type = unassigned DNA
ggtgtttgaggatataaaatttctactattgtagat

SEQ ID NO: 547 - DNA, 37 bp, unidentified
  misc_feature 1..37: note = Sequence from GenBank assembly GCA_900319475.1
  source 1..37: mol_type = unassigned DNA
aatctacaatagtagaaattatattagctttatagcc

SEQ ID NO: 548 - DNA, 36 bp, unidentified
  misc_feature 1..36: note = Sequence from GenBank assembly GCA_900319825.1
  source 1..36: mol_type = unassigned DNA
atctacaatagtagaaattaataaagccttatagac

SEQ ID NO: 549 - DNA, 36 bp, unidentified
  misc_feature 1..36: note = Sequence from GenBank assembly GCA_900319865.1
  source 1..36: mol_type = unassigned DNA
gtctagagacaaaagataatttctactattgtagat

SEQ ID NO: 550 - DNA, 20 bp, unidentified
  misc_feature 1..20: note = Sequence from GenBank assembly GCA_900320305.1
  source 1..20: mol_type = unassigned DNA
taatttctactattgtagat

SEQ ID NO: 551 - DNA, 38 bp, Lachnospira sp.; identical to SEQ ID NO: 361
  source 1..38: mol_type = unassigned DNA

SEQ ID NO: 552 - DNA, 36 bp, unidentified; identical to SEQ ID NO: 306
  misc_feature 1..36: note = Sequence from GenBank assembly GCA_902362905.1
  source 1..36: mol_type = unassigned DNA

SEQ ID NO: 553 - DNA, 36 bp, unidentified
  misc_feature 1..36: note = Sequence from GenBank assembly GCA_902363805.1
  source 1..36: mol_type = unassigned DNA
gtttgaataacttataatttctactgatgtgtagat

SEQ ID NO: 554 - DNA, 36 bp, Eubacterium ventriosum; identical to SEQ ID NO: 486
  source 1..36: mol_type = unassigned DNA

SEQ ID NO: 555 - DNA, 36 bp, Acidaminococcus sp.; identical to SEQ ID NO: 280
  source 1..36: mol_type = unassigned DNA

SEQ ID NO: 556 - DNA, 18 bp, Acidaminococcus sp.
  source 1..18: mol_type = unassigned DNA
atttcaatccacgccccc

SEQ ID NO: 557 - DNA, 31 bp, Acidaminococcus sp.; identical to SEQ ID NO: 282
  source 1..31: mol_type = unassigned DNA

SEQ ID NO: 558 - DNA, 28 bp, Acidaminococcus sp.
  source 1..28: mol_type = unassigned DNA
tttctaagctaccttcacggtagtaagc

SEQ ID NO: 559 - DNA, 36 bp, unidentified; identical to SEQ ID NO: 546
  misc_feature 1..36: note = Sequence from GenBank assembly GCA_902755295.1
  source 1..36: mol_type = unassigned DNA

SEQ ID NO: 560 - DNA, 36 bp, unidentified
  misc_feature 1..36: note = Sequence from GenBank assembly GCA_902756705.1
  source 1..36: mol_type = unassigned DNA
ggtgtaaaccatagtaaaatttctgctattgcagat

SEQ ID NO: 561 - DNA, 36 bp, unidentified; identical to SEQ ID NO: 549
  misc_feature 1..36: note = Sequence from GenBank assembly GCA_902758855.1
  source 1..36: mol_type = unassigned DNA

SEQ ID NO: 562 - DNA, 37 bp, unidentified; identical to SEQ ID NO: 543
  misc_feature 1..37: note = Sequence from GenBank assembly GCA_902759135.1
  source 1..37: mol_type = unassigned DNA

SEQ ID NO: 563 - DNA, 38 bp, unidentified
  misc_feature 1..38: note = Sequence from GenBank assembly GCA_902759185.1
  source 1..38: mol_type = unassigned DNA
atctacaatagtagaaattatattagctttatagccta

SEQ ID NO: 564 - DNA, 37 bp, unidentified; identical to SEQ ID NO: 547
  misc_feature 1..37: note = Sequence from GenBank assembly GCA_902759185.1
  source 1..37: mol_type = unassigned DNA

SEQ ID NO: 565 - DNA, 36 bp, unidentified
  misc_feature 1..36: note = Sequence from GenBank assembly GCA_902761105.1
  source 1..36: mol_type = unassigned DNA
ggctaataagtcgatgtaatttctactattgtagat

SEQ ID NO: 566 - DNA, 36 bp, unidentified
  misc_feature 1..36: note = Sequence from GenBank assembly GCA_902761465.1
  source 1..36: mol_type = unassigned DNA
ggtgttagtatatacaaaatttctactattgtagat

SEQ ID NO: 567 - DNA, 25 bp, unidentified
  misc_feature 1..25: note = Sequence from GenBank assembly GCA_902761775.1
  source 1..25: mol_type = unassigned DNA
atctacaatagtagaaattatgtgt

SEQ ID NO: 568 - DNA, 36 bp, unidentified; identical to SEQ ID NO: 545
  misc_feature 1..36: note = Sequence from GenBank assembly GCA_902758325.1
  source 1..36: mol_type = unassigned DNA

SEQ ID NO: 569 - DNA, 36 bp, unidentified; identical to SEQ ID NO: 548
  misc_feature 1..36: note = Sequence from GenBank assembly GCA_902762935.1
  source 1..36: mol_type = unassigned DNA

SEQ ID NO: 570 - DNA, 40 bp, unidentified
  misc_feature 1..40: note = Sequence from GenBank assembly GCA_902763365.1
  source 1..40: mol_type = unassigned DNA
aaatctacaacagtagaaatttaaaggttgatataaaccc

SEQ ID NO: 571 - DNA, 36 bp, unidentified
  misc_feature 1..36: note = Sequence from GenBank assembly GCA_902769235.1
  source 1..36: mol_type = unassigned DNA
atctacaatagtagaaattttgtatatactaacacc

SEQ ID NO: 572 - DNA, 41 bp, unidentified
  misc_feature 1..41: note = Sequence from GenBank assembly GCA_902770705.1
  source 1..41: mol_type = unassigned DNA
ggggtctaattgactcaattaatttctactattgtagattt

SEQ ID NO: 573 - DNA, 36 bp, unidentified
  misc_feature 1..36: note = Sequence from GenBank assembly GCA_902770705.1
  source 1..36: mol_type = unassigned DNA
gtctaattgactcaattaatttctactattgtagat

SEQ ID NO: 574 - DNA, 36 bp, Fibrobacter succinogenes
  source 1..36: mol_type = unassigned DNA
gcctagaagcttcgtaaaatttctactcttgtagat

SEQ ID NO: 575 - DNA, 36 bp, unidentified
  misc_feature 1..36: note = Sequence from GenBank assembly GCA_902773555.1
  source 1..36: mol_type = unassigned DNA
atctacaacagtagaaattattgaggccttatagcc

SEQ ID NO: 576 - DNA, 40 bp, unidentified
  misc_feature 1..40: note = Sequence from GenBank assembly GCA_902774105.1
  source 1..40: mol_type = unassigned DNA
aagagtctataggactcaaataatttctactattgtagat

SEQ ID NO: 577 - DNA, 36 bp, unidentified
  misc_feature 1..36: note = Sequence from GenBank assembly GCA_902774105.1
  source 1..36: mol_type = unassigned DNA
gtctataggactcaaataatttctactattgtagat

SEQ ID NO: 578 - DNA, 36 bp, unidentified
  misc_feature 1..36: note = Sequence from GenBank assembly GCA_902774245.1
  source 1..36: mol_type = unassigned DNA
gtttcagcccatggactaatttctacttttgtagat

SEQ ID NO: 579 - DNA, 37 bp, unidentified
  misc_feature 1..37: note = Sequence from GenBank assembly GCA_902774255.1
  source 1..37: mol_type = unassigned DNA
catctacaatagtagaaattaattgagtcaattagac

SEQ ID NO: 580 - DNA, 36 bp, unidentified
  misc_feature 1..36: note = Sequence from GenBank assembly GCA_902774255.1
  source 1..36: mol_type = unassigned DNA
atctacaatagtagaaattaattgagtcaattagac

SEQ ID NO: 581 - DNA, 42 bp, unidentified
  misc_feature 1..42: note = Sequence from GenBank assembly GCA_902774585.1
  source 1..42: mol_type = unassigned DNA
aaagtttaataccttaattaaatttctactattgtagatacc

SEQ ID NO: 582 - DNA, 36 bp, unidentified
  misc_feature 1..36: note = Sequence from GenBank assembly GCA_902775165.1
  source 1..36: mol_type = unassigned DNA
atctacgatagtagaaattctatggttctcttagag

SEQ ID NO: 583 - DNA, 36 bp, unidentified
  misc_feature 1..36: note = Sequence from GenBank assembly GCA_902775605.1
  source 1..36: mol_type = unassigned DNA
atctacaatagtagaaatttaatatggtcttacacc

SEQ ID NO: 584 - DNA, 35 bp, unidentified
  misc_feature 1..35: note = Sequence from GenBank assembly GCA_902777805.1
  source 1..35: mol_type = unassigned DNA
gtctataagacaaatacaatttctactattgtaga

SEQ ID NO: 585 - DNA, 36 bp, unidentified
  misc_feature 1..36: note = Sequence from GenBank assembly GCA_902778535.1
  source 1..36: mol_type = unassigned DNA
ggtgtaaaaccattgaaaatttctacttgtgtagat

SEQ ID NO: 586 - DNA, 36 bp, unidentified; identical to SEQ ID NO: 573
  misc_feature 1..36: note = Sequence from GenBank assembly GCA_902778615.1
  source 1..36: mol_type = unassigned DNA

SEQ ID NO: 587 - DNA, 36 bp, unidentified
  misc_feature 1..36: note = Sequence from GenBank assembly GCA_902779195.1
  source 1..36: mol_type = unassigned DNA
ctctaagaggatatataaatttctactgttgtagat

SEQ ID NO: 588 - DNA, 36 bp, Fibrobacter succinogenes
  source 1..36: mol_type = unassigned DNA
atctacaagagtagaaattttatgaagcttctaggc

SEQ ID NO: 589 - DNA, 37 bp, unidentified
  misc_feature 1..37: note = Sequence from GenBank assembly GCA_902780215.1
  source 1..37: mol_type = unassigned DNA
tggtgttagtatatacaaaatttctactattgtagat

SEQ ID NO: 590 - DNA, 36 bp, unidentified; identical to SEQ ID NO: 566
  misc_feature 1..36: note = Sequence from GenBank assembly GCA_902780215.1
  source 1..36: mol_type = unassigned DNA

SEQ ID NO: 591 - DNA, 37 bp, unidentified
  misc_feature 1..37: note = Sequence from GenBank assembly GCA_902784335.1
  source 1..37: mol_type = unassigned DNA
ggctataagatataatgatttctactgaaatgtagat

SEQ ID NO: 592 - DNA, 38 bp, unidentified
  misc_feature 1..38: note = Sequence from GenBank assembly GCA_902784335.1
  source 1..38: mol_type = unassigned DNA
aggctataagatataatgatttctactgaaatgtagat

SEQ ID NO: 593 - DNA, 36 bp, unidentified
  misc_feature 1..36: note = Sequence from GenBank assembly GCA_902785195.1
  source 1..36: mol_type = unassigned DNA
gtctaaaagagactataaatttctactattgtagat

SEQ ID NO: 594 - DNA, 36 bp, unidentified
  misc_feature 1..36: note = Sequence from GenBank assembly GCA_902786255.1
  source 1..36: mol_type = unassigned DNA
atctacaacagtagaaattataaggggttattattc

SEQ ID NO: 595 - DNA, 22 bp, Fibrobacter succinogenes
  source 1..22: mol_type = unassigned DNA
atctacaagagtagaaattttc

SEQ ID NO: 596 - DNA, 36 bp, unidentified
  misc_feature 1..36: note = Sequence from GenBank assembly GCA_902786865.1
  source 1..36: mol_type = unassigned DNA
gtctaaaagacatttttaatttctactattgtagat

SEQ ID NO: 597 - DNA, 36 bp, unidentified
  misc_feature 1..36: note = Sequence from GenBank assembly GCA_902787735.1
  source 1..36: mol_type = unassigned DNA
atctacaatagtagaaattttgtatgctcatacatc

SEQ ID NO: 598 - DNA, 36 bp, unidentified
  misc_feature 1..36: note = Sequence from GenBank assembly GCA_902787825.1
  source 1..36: mol_type = unassigned DNA
atctacaatagtagaaattaaaagggattatttatc

SEQ ID NO: 599 - DNA, 36 bp, unidentified
  misc_feature 1..36: note = Sequence from GenBank assembly GCA_902788275.1
  source 1..36: mol_type = unassigned DNA
atctacgatagtagaaattataaaggctttatagcc

SEQ ID NO: 600 - DNA, 37 bp, unidentified
  misc_feature 1..37: note = Sequence from GenBank assembly GCA_902788315.1
  source 1..37: mol_type = unassigned DNA
ggctataaggaataataatttctactgtaatgtagat

SEQ ID NO: 601 - DNA, 36 bp, unidentified; identical to SEQ ID NO: 566
  misc_feature 1..36: note = Sequence from GenBank assembly GCA_902789995.1
  source 1..36: mol_type = unassigned DNA

SEQ ID NO: 602 - DNA, 36 bp, unidentified; identical to SEQ ID NO: 578
  misc_feature 1..36: note = Sequence from GenBank assembly GCA_902791265.1
  source 1..36: mol_type = unassigned DNA

SEQ ID NO: 603 - DNA, 36 bp, unidentified
  misc_feature 1..36: note = Sequence from GenBank assembly GCA_902791725.1
  source 1..36: mol_type = unassigned DNA
atctacaatagtagaaattatttgagtcctttagac

SEQ ID NO: 604 - DNA, 36 bp, unidentified
  misc_feature 1..36: note = Sequence from GenBank assembly GCA_902791765.1
  source 1..36: mol_type = unassigned DNA
atctacaatagtagaaattttgtatgcccatacagc

SEQ ID NO: 605 - DNA, 36 bp, unidentified
  misc_feature 1..36: note = Sequence from GenBank assembly GCA_902792795.1
  source 1..36: mol_type = unassigned DNA
atctacaacagtagaaattccatatcagtttgaaac

SEQ ID NO: 606 - DNA, 36 bp, unidentified
  misc_feature 1..36: note = Sequence from GenBank assembly GCA_902793385.1
  source 1..36: mol_type = unassigned DNA
gtttcaactttataaagaatttctactgttgtagat

SEQ ID NO: 607 - DNA, 35 bp, unidentified
  misc_feature 1..35: note = Sequence from GenBank assembly GCA_902793385.1
  source 1..35: mol_type = unassigned DNA
tttcaactttataaagaatttctactgttgtagat

SEQ ID NO: 608 - DNA, 36 bp, unidentified; identical to SEQ ID NO: 408
  misc_feature 1..36: note = Sequence from GenBank assembly GCA_902793705.1
  source 1..36: mol_type = unassigned DNA

SEQ ID NO: 609 - DNA, 39 bp, unidentified
  misc_feature 1..39: note = Sequence from GenBank assembly GCA_902793715.1
  source 1..39: mol_type = unassigned DNA
tcgatctacaacagtagaaatttcattatgctcttaggc

SEQ ID NO: 610 - DNA, 36 bp, unidentified
  misc_feature 1..36: note = Sequence from GenBank assembly GCA_902790465.1
  source 1..36: mol_type = unassigned DNA
gtctaataactaccttaaatgcctactattgtaggt

SEQ ID NO: 611 - DNA, 36 bp, unidentified
  misc_feature 1..36: note = Sequence from GenBank assembly GCA_902794405.1
  source 1..36: mol_type = unassigned DNA
atctacaatagtagaaattttatatgctcttacagc

SEQ ID NO: 612 - DNA, 32 bp, unidentified
  misc_feature 1..32: note = Sequence from GenBank assembly GCA_902794785.1
  source 1..32: mol_type = unassigned DNA
atctgcgatagcagaaattttaatatggttta

SEQ ID NO: 613 - DNA, 36 bp, unidentified
  misc_feature 1..36: note = Sequence from GenBank assembly GCA_902795205.1
  source 1..36: mol_type = unassigned DNA
atctacaacagtagaaatttagtatgaagttcaaac

SEQ ID NO: 614 - DNA, 18 bp, unidentified
  misc_feature 1..18: note = Sequence from GenBank assembly GCA_902795225.1
  source 1..18: mol_type = unassigned DNA
ccgtgaaaaatgtagctt

SEQ ID NO: 615 - DNA, 37 bp, unidentified
  misc_feature 1..37: note = Sequence from GenBank assembly GCA_902795505.1
  source 1..37: mol_type = unassigned DNA
ggtctataaggccaatcaaatttctactattgtagat

SEQ ID NO: 616 - DNA, 36 bp, unidentified
  misc_feature 1..36: note = Sequence from GenBank assembly GCA_902795505.1
  source 1..36: mol_type = unassigned DNA
gtctataaggccaatcaaatttctactattgtagat

SEQ ID NO: 617 - DNA, 36 bp, unidentified
  misc_feature 1..36: note = Sequence from GenBank assembly GCA_902798235.1
  source 1..36: mol_type = unassigned DNA
gcctataaaggcacaataatttctactattgtagat

SEQ ID NO: 618 - DNA, 36 bp, unidentified
  misc_feature 1..36: note = Sequence from GenBank assembly GCA_902798615.1
  source 1..36: mol_type = unassigned DNA
atctacaatagtagaaattcatagtctcttttagac

SEQ ID NO: 619 - DNA, 36 bp, unidentified
  misc_feature 1..36: note = Sequence from GenBank assembly GCA_902798705.1
  source 1..36: mol_type = unassigned DNA
atctacaatagtagaaattattgaggagttatagcc

SEQ ID NO: 620 - DNA, 36 bp, unidentified; identical to SEQ ID NO: 613
  misc_feature 1..36: note = Sequence from GenBank assembly GCA_902799665.1
  source 1..36: mol_type = unassigned DNA

SEQ ID NO: 621 - DNA, 37 bp, unidentified
  misc_feature 1..37: note = Sequence from GenBank assembly GCA_902799815.1
  source 1..37: mol_type = unassigned DNA
ggtgttagtatatacaaaatttctactattgtagata

SEQ ID NO: 622 - DNA, 36 bp, unidentified; identical to SEQ ID NO: 566
  misc_feature 1..36: note = Sequence from GenBank assembly GCA_902799815.1
  source 1..36: mol_type = unassigned DNA

SEQ ID NO: 623 - DNA, 36 bp, unidentified
  misc_feature 1..36: note = Sequence from GenBank assembly GCA_902799975.1
  source 1..36: mol_type = unassigned DNA
ggtgtaagaccatattaaatttctactattgtagat

SEQ ID NO: 624 - DNA, 36 bp, unidentified; identical to SEQ ID NO: 573
  misc_feature 1..36: note = Sequence from GenBank assembly GCA_902800995.1
  source 1..36: mol_type = unassigned DNA

SEQ ID NO: 625 - DNA, 36 bp, unidentified
  misc_feature 1..36: note = Sequence from GenBank assembly GCA_902801105.1
  source 1..36: mol_type = unassigned DNA
gtctatacgacaaagataatttctactattgtagat

SEQ ID NO: 626 - DNA, 36 bp, unidentified
  misc_feature 1..36: note = Sequence from GenBank assembly GCA_902801425.1
  source 1..36: mol_type = unassigned DNA
atctacaatagtagaaatttatagtctcttttagac

SEQ ID NO: 627 - DNA, 36 bp, unidentified
  misc_feature 1..36: note = Sequence from GenBank assembly GCA_902800305.1
  source 1..36: mol_type = unassigned DNA
ggtgtaaaagcctttaaaatttctactattgtagat

SEQ ID NO: 628 - protein, 7 aa, synthetic construct
  REGION 1..7: note = Nuclear localization signal
PKKKRKV

SEQ ID NO: 629 - protein, 9 aa, synthetic construct
  REGION 1..9: note = Nuclear localization signal
PAAKRVKLD

SEQ ID NO: 630 - protein, 9 aa, synthetic construct
  REGION 1..9: note = Nuclear localization signal
KLKIKRPVK

SEQ ID NO: 631 - protein, 16 aa, synthetic construct
  REGION 1..16: note = Nuclear localization signal
KRPAATKKAGQAKKKK

SEQ ID NO: 632 - DNA, 3789 bp, synthetic construct
  misc_feature 1..3789: note = Sequence codon optimized for E. coli expression
  source 1..3789: mol_type = other DNA
atgaataacggtaccaataactttcaaaatttcatagggatatcctcccttcagaagactttgagaaatgcgttgatccccacggagacaacacagcagtttatagtgaagaacggaataattaaagaagatgaattgcgtggggagaaccgccaaattctgaaggatataatggatgactattatcgcggcttcatcagtgagacgctgtcgagtatagacgacatagactggacttccttattcgaaaagatggagatccagttaaaaaacggggacaacaaggacacgcttataaaggaacaggcagaaaaacggaaggccatctataagaaatttgccgatgatgaccgctttaagaatatgttttcagcgaagttgatatcggacatactgcccgagtttgtaatacacaacaacaattatagtgcatcggaaaaggaagaaaagacccaggtgattaagttgttcagtagatttgctacgtcattcaaagattatttcaagaatcgtgctaattgctttagcgctgatgacatttcaagtagttcttgtcatagaatcgttaatgataatgcagagatatttttcagtaacgcgttggtatatagacgcatcgtaaagaacctttcgaacgacgatataaataaaattagtggggatatgaaagactcacttaaggagatgtctttagaaaagatttattcatatgagaagtacggcgaattcatcacacaggagggaattagtttttataatgacatttgcggaaaggtgaacagttttatgaacctgtactgtcaaaaaaataaggaaaataagaatctgtataagctgcgtaaactgcacaaacagatactgtgcattgcggacacttcatatgaagttccatataaattcgaatccgacgaggaggtctatcaatctgtaaacgggttcctggacaacatcagctcaaaacacatcgtagaacggttacgtaaaattggcgacaattataatgggtataatttggacaaaatatacatcgtttcgaagttctatgaacttgtcagtcaaaaaacctaccgtgattgggaaactataaataccgcccttgagatccattataataacatcctgcctggtaacggaaaatccaaagctgacaaggtaaagaaagctgttaaaaatgatcttcagaagtcgattacagagatcaatgaattggttagtaactataagttgtgtcccgatgacaacataaaggcagagacctatattcacgaaattagccatattctgaataatttcgaggctcaggagctgaaatacaatcccgagatacacttggttgagtcagaattaaaggcgtcagaattaaaaaatgtacttgatgtcataatgaatgcctttcattggtgcagcgtattcatgacggaagagcttgtagataaagataacaatttctatgctgaattagaggaaatttatgatgaaatctatccagtgatcagtttgtataacctggtgcgtaattacgtaactcaaaaaccatactcgacgaagaagattaagctgaacttcggcataccaacattagccgatggttggtcaaagagcaaggagtatagcaataacgcgatcattttaatgcgggacaatctttattatttaggaatcttcaacgccaaaaacaagccagataagaagatcattgagggcaatacatccgaaaacaagggagattacaaaaaaatgatctacaacttgctgcccggacctaataaaatgatacctaaagtatttttgtcaagcaagacgggcgttgaaacttacaaaccctcggcgtatatcctggagggctacaagcaaaacaagcatttaaaatctagcaaggatttcgacattaccttttgccgcgatctgattgattattttaaaaactgcatcgctattcatccagagtggaagaatttcgggttcgacttcagcgacacatctacatatgaagatatatctggtttttatcgtgaagtagaactgcaaggttacaagatcgactggacgtacatcagtgagaaagatatcgatctgttacaagagaagggccaattgtacctgtttcagatctacaacaaagatttcagcaagaagtctaccggaaatgataacttgcacaccatgtatcttaagaatcttttttccgaagagaacttgaaggacatcgtattaaagcttaatggcgaagctgagatcttctttcgtaaatcaagtataaaaaaccccattatacacaagaaagggagtatcttagttaaccgcacatacgaagcagaggaaaaggaccaatttgggaatattcagatagtgagaaagacgataccggagaacatttaccaggagttatacaagtacttcaacgacaagtctgataaagagctttcagatgaagctgctaaattgaagaatgtggtcggacatcatgaagcggccaccaatatagtcaaagactaccggtatacttatgacaagtattttctgcatatgccgataactattaattttaaggccaataaaacctctttcatcaatgaccgtattttgcagtatattgccaaagaaaaggatctgcatgttattggcattgaccgtggggagagaaaccttatatacgtgtcagtcatagatacgtgcgggaatattgttgaacagaaatcatttaacatagtaaacgggtatgattaccagattaaactgaaacagcaggaaggtgcgcggcaaatcgcgcggaaagagtggaaagagattgggaaaattaaagaaattaaagaggggtacctgtcgttggtaattcacgaaatctcgaagatggtaataaaatacaacgccattatcgcaatggaagacctttcttacggcttcaagaaaggccggtttaaggtggagcggcaagtctaccagaagtttgagacaatgcttataaacaaacttaactatcttgtgttcaaagatatctcaattacggagaacggaggccttttgaagggatatcaacttacttatatcccggagaaactgaagaacgtcggccatcagtgtggatgtatcttttatgttccggcggcctatacctctaagatcgaccccacaacaggttttgtaaacattttcaagtttaaagatcttaccgttgatgcaaaacgtgagtttattaagaaattcgactccattagatatgattccgaaaagaatctgttttgttttacgtttgactacaataacttcattacacagaacaccgtaatgtcgaaaagcagttggtccgtatacacgtacggagttcggattaagagacgttttgtaaacggtcggtttagtaacgaatccgacacaatagatattacaaaggatatggaaaaaacacttgagatgaccgatattaattggcgcgatggccatgacctgcgtcaggatattatcgactatgagatagtgcagcatattttcgagatatttcggcttactgtgcagatgcgcaatagtcttagcgaattagaagaccgggattatgatagattaatcagtccggtccttaacgaaaacaacatcttttacgattcggcgaaggcgggggatgcattgcccaaagatgcggatgccaatggggcatattgcattgctttgaaaggactttacgaaattaagcaaattactgagaattggaaagaggatggcaaattcagtcgggataagctgaaaattagcaacaaggattggtttgatttcatccagaataaacggtattta

SEQ ID NO: 633 - DNA, 3591 bp, synthetic construct
  misc_feature 1..3591: note = Sequence codon optimized for E. coli expression
  source 1..3591: mol_type = other DNA
atgggggaagttaagcttactaagttggcagaattctacgacgtgtacttaaagtttcgtaaaaaccccaaagatgatggtttgcaaaagcaactgaaagatttacaagcggtattacgcaaagaaatcgtaaaaccaatagggaatggcggcaaatataaagcgggttacgacagattatttggagcaaaacttttcaaggacggtaaggaattaggcgacttggctaaatttgtaatcgcccaggagggcgaaagctccccgaaattagcgcacttggctcacttcgaaaagtttagtacgtatttcactggttttcatgataatcggaagaacatgtatagcgacgaggacaagcatacagctattgcttatcggttaatccacgagaaccttccgcgcttcatcgacaatctgcagattctggcgacgatcaagcaaaagcacagcgctctgtacgaccagattataaacgaattaactgcgagtggcttggatgtcagtcttgctagccacttggatggctatcataaactgctgacccaagaggggattactgcttataatactttactggggggaataagtggagaagcaggcagcagaaagatacaaggcatcaatgaactgataaacagtcatcataaccaacactgtcataaatcagaacgtattgcaaagctgcggcccttacacaaacaaattttatcggacggtatgggcgtgtcctttcttccctcaaagtttgctgacgatagcgaggtttgccaggcggtcaacgaattttaccggcactatgccgacgttttcgctaaggtccaatccctgttcgatggatttgacgattaccaaaaggatggaatttacgtggagtataaaaatttaaatgagctgtcaaaacaagcctttggcgattttgcgcttctgggtagagttctggatggttattacgtagacgtggtcaatccggagtttaacgaacgctttgcgaaagcgaagaccgacaatgctaaagcgaagcttaccaaagagaaagacaagtttattaaaggagtccattcgcttgcgtctttggaacaagctattgaacattacacagcacgtcatgacgatgaatcagttcaagcggggaagctgggccaatattttaagcatggactggctggagttgataatccgattcaaaagatccacaacaatcactcgactattaaaggctttttagaaagagagcggccagctggtgagagagccttacccaaaattaaatctgacaaaagccctgaaattcgtcagcttaaagagcttcttgataacgcgttaaacgtcgcgcactttgcgaaattgttgactacaaaaaccactttacataatcaggacggcaacttctatggggaatttggcgcattatatgacgaacttgcgaagatcgctactttatataacaaagtgcgggactatcttagtcagaaaccgttcagcacagaaaagtacaagttaaattttgggaacccaacgttgcttaatggttgggaccttaacaaagaaaaggataactttggtgtgatattgcagaaggacggctgttattacttggcattactggataaagctcacaagaaggtctttgataacgccccaaatactggtaagtcagtttaccagaagatgatttataagctgttacctggtcctaacaagatgttgccgaaagtattcttcgccaaaagcaacctggattattataacccgagcgcggagctgttagacaagtatgcccaaggcactcataagaaaggggataatttcaatttgaaagattgccatgcactgattgattttttcaaggcgggaattaataagcatccggaatggcagcatttcgggtttaagttttctcccacgtcctcgtaccaagacctgtctgacttttaccgggaggtggaacctcaaggataccaagtaaaatttgtcgacataaatgcggactatatcaacgagcttgtggaacaaggtcaactgtatcttttccaaatctataataaggacttttcaccgaaggcgcacgggaagcctaacctgcacactttatacttcaaggcgttattctcggaggacaaccttgtcaatccaatctacaaacttaatggggaggcggaaattttttaccggaaggcctctcttgatatgaatgaaacaacgatacaccgggctggagaggttctggagaacaaaaatcctgacaatcctaagaagagacagttcgtttacgatatcattaaggataaacgttatactcaggataagttcatgctgcacgttccgataactatgaattttggggtgcagggtatgacaattaaggagttcaataaaaaagtcaaccagagcatacagcaatatgatgaagtgaacgtgattgggattgaccggggcgaaagacatctgttgtatctgactgtgattaatagcaagggcgagattctggaacaaagatcccttaatgacattacgaccgcgtctgccaacggtacgcaaatgacaacaccctatcacaagatattagacaaacgtgagatcgagagacttaatgctagagtaggctggggagagatagagacaatcaaagaactgaaatcggggtatctgtcacacgttgttcaccagatctcacagctgatgttgaaatacaacgcaattgtagtattggaggacttaaattttggctttaagcgtgggagattcaaagtcgaaaaacaaatataccagaattttgagaacgcccttataaaaaagttgaatcatctggtcttaaaagacaaggctgacgacgagattggttcttataagaacgcccttcagttaaccaacaactttacagaccttaagtctataggtaaacaaacgggattcttattctacgtaccggcatggaacacgtcaaaaattgatccggagacgggattcgtagatctgttgaaaccgcgttatgaaaatatcgcacagagtcaggcttttttcggtaaatttgacaagatatgctacaatgccgaccgtggttattttgaattccatatagattacgccaagttcaacgataaggcgaaaaactcccgccaaatctggaaaatctgcagtcatggcgataaaagatatgtgtatgataagacggcgaatcagaacaagggagcgacaattggagtaaacgtcaatgacgaattaaagagtttgttcacgagataccatattaatgacaaacaaccgaacctggttatggacatttgccaaaataacgataaggagtttcataagtcgctgatgtacttattgaagaccttgttagcccttcggtatagtaacgcgagttctgacgaagactttattttaagccctgtagccaatgacgagggggtcttcttcaatagtgcgttggccgacgatacccaaccgcaaaacgccgatgctaatggggcctatcacatagcacttaaaggcctttggcttttaaacgagctgaagaactcagatgacttaaacaaagtcaagctggccattgacaaccaaacctggttgaattttgcgcaaaatcgt

SEQ ID NO: 634 - DNA, 4101 bp, synthetic construct
  misc_feature 1..4101: note = Sequence codon optimized for E. coli expression
  source 1..4101: mol_type = other DNA
atggagaagtctttgaacgactttatcggcctttattcagtctctaaaactttgcggtttgaattaaagcccgtgtccgagactttagagaacatcaagaagttccacttcctggaggaagataaaaaaaaggctaatgactataaggacgtgaagaagattatcgataactaccacaaatattttatagacgatgttcttaagaatgccagttttaattggaaaaaattagaagaagctataagagagtataataaaaacaagtctgatgactcggccttagtggctgaacagaaaaagttgggtgacgccattctgaagcttttcacctcggacaagcgttataaagcacttacagccgcgacgcctaaggaattgttcgagtccatcctgcccgattggttcggggagcaatgtaatcaggaccttaataaagccgccctgaaaaccttccaaaaattcaccagctactttacgggatttcaagagaaccgtaagaatgtatattcagccgaggccattcccacggcagtgccatatcgcatagtcaacgacaacttcccaaagttcctgcaaaacgtcctgatattcaaaacgattcaggaaaaatgcccacagattatagacgaagtagaaaaagagctgtcatcgtatttgggaaaggagaaattagccggaatattcacgctggagtcgtttaataaatatttggggcaaggcggcaaagagaatcaacggggcattgatttctacaaccagatcattggtggggtcgtcgaaaaagaagggggaatcaacctgcgtggagtaaaccagtttcttaatttgtattggcaacaacatccagattttaccaaagaggacagaagaatcaaaatggtacccttatataaacaaatattatctgaccggtcttcccttagttttaaaattgagagcatagagaacgacgaggagttaaaaaatgcacttcttgaatgcgcagacaagttggaattaaagaatgacgagaagaagtcaatctttgaggaggtctgcgatttattttcgtccgtgaaaaatcttgatctgagcggtatatacattaaccgcaaggatattaatagtgtatctagaatactgactggtgattggtcgtggctgcaaagcagaatgaacgtctacgctgaagagaagttcaccactaaagcagaaaaagcgcggtggcaaaaatccttggatgatgagggagagaacaaatcaaagggtttttattcattgactgatttaaatgaggtcttggagtactcatcggaaaatgttgcagaaacggacattcgtattacagattattttgaacatcgctgtcggtattatgttgataaagaaacagaaatgtttgttcaaggatcagagcttgttgcattatctctgcaagaaatgtgcgatgatatactgaagaaacgcaaagcaatgaacaccgtgctggagaatcttagctcggaaaacaagttgagagagaaaacagatgatgtcgcggttataaaagagtatttagatgctgttcaagaacttctgcaccggataaagcccctgaaagtgaatggtgtaggagattctacattttactcagtgtacgactcgatttactcagcactttcagaagtcatctccgtttacaataagacacggaattatattaccaagaaggccgcatctccggagaaatataaacttaattttgacaatcccacacttgccgatggttgggatttaaacaaggaacaggcaaatacgtctgtgatcctgcggaaagatgggatgttttacttaggcataatgaatccgaagaacaaaccaaagttcgctgaaaaatatgactgcggtaatgaaagctgttacgagaagatgatatataagcaattcgacgcaaccaaacagataccgaaatgctcaacgcagaagaaagaggtccagaaatactttttaagcggagcaacagaaccgtacattcttaatgataagaagtcattcaaatctgagttgatcataactaaggatatttggtttatgaacaaccatgtgtgggatggcgagaaattcgtcccaaagcgggataacgagactagaccaaaaaaattccagataggatacttcaagcaaacaggggattttgatggatataagaatgctttgtctaactggatttcgttctgcaagaactttttgcaatcctatctttcagcaaccgtgtatgactacaatttcaagaattccgaggagtacgagggtttggacgaattctacaattacctgaatgccacctgctataaacttaactttattaacatcccggagaccgagattaataaaatggtatcggaagggaaattgtacttgtttcagatctacaataaagactttgcctccggctccactgggatgcctaatatgcacaccctttattggaagaatctgttttcagatgaaaacttaaaaaacgtatgtttgaaactgaacggggaggccgaattgttttatcgtccagctgggataaaagagccggtaatacacaaagaaggttcatatctggttaaccgcacgacggaagacggggaaagcattccggagaaaatttactttgagatatataaaaacgccaacggaaaattagaaaagctgagtgacgaagcacagaactatatttctaatcatgaagtggttataaaaaaggcgggacacgagattatcaaagaccgccactacaccgagcccaaattcctgtttcatgtaccattgaccatcaacttcaaggcttcaggcaattcgtattctatcaacgaaaatgtgcgtaaatttttgaaaaacaatcctgatgttaatattatcggcctggatagaggcgagcgtcacttgatttatttgtcacttataaatcagaagggagaaattattaagcagtttacctttaacgaagttgagcgtaataagaacggccgtacgattaaagttaactatcacgaaaagttggaccagcgtgagaaagagcgcgacgcagccagaaagtcttggcaggccataggcaaaatagcggaattaaaagagggatatttgtctgctgttattcatcagctgacaaaattaatggtcgagtataacgctgtggttgtaatggaggatcttaatttcggttttaagagaggacgtttccatgtggaaaaacaggtgtatcagaagttcgaacatatacttatagacaagagtaactaccttgtatttaaggatagaggattaaatgaaccaggaggtgtattaaacgggtatcaaatagctgggcaattcgaaagctttcagaaacttggtaaacaaagtggtatgctgttttacgttcccgctgggtatacctcaaaaattgatcctaagaccggatttgtctccatgatgaattttaaggatttaactaatgtgcacaagaagagagattttttctccaagtttgacaatatacactacgatgaggctaacggtagtttcgtttttacctttgattataagaagttcgatggtaaggcgaaggaggaaatgaaacttaccaaatggtccgtatattcacgcgataaacggatagtttactttgccaaaacgaaatcttatgaagatgtccttcctacggaaaaacttcaaaagatcttcgagtcaaacggaatcgactacaaatctggtaataacatacaggattctgtgatggcgattggcgctgacttgaaagaaggcgcaaaaccctcgaaggaaatcagcgacttctgggatgggcttctgtcgaatttcaaacttatattgcagatgagaaatagtaatgcgcgcacgggagaagattacataatcagccctgtgatggctgatgatggtaccttctttgattcgagagaagagttcaagaaaggtgaggatgccaaattacctcttgacgctgatgcgaacggtgcgtaccatatcgcattgaaaggactgtccttaattaataagatcaacctttctaaagatgaggagctgaagaagtttgacatgaaaatttccaatgcggattggttcaaatttgcgcaagagaagaattatgcaaaa

SEQ ID NO: 635 - DNA, 4032 bp, synthetic construct
  misc_feature 1..4032: note = Sequence codon optimized for E. coli expression
  source 1..4032: mol_type = other DNA
atgaaaaccattgaaaatttctgtggccaaaaaaatggatattcacgttctataacgttacgtaaccgtttgataccgattggcaagacggaagaaaacatcgagaagttgcaattattggacaacgatataaaacgttcgaaggcttatgttgaagtcaagtctatgattgatgactttcatcgtgccttcattgaggaggttttatccaaagcgaaattggaatggggcccgttgtacgatctgttcgacctttttcaaaacgaaaaggacaagcataaaaaatccaagataaagaaagaattggagaccatacaaggggtcatgcgtaagcagattgtaaaaaaattcaaggacgatgatagattcgacaaactttttaaaaaggagatccttacagagttcgtgccaactgtaattaaagctgacgagtccggcacaattagcgataaacgtgctgccttggatgtattcaagggttttgcgacctacttcaccggattccatcaaaaccgtcaaaacatgtattctgaggaggctaaagcaaccgcgatcagtaaccgtatagtgaatgagaacttcccgaagttctatgccaacgtaaaggtatttgaatgtttacagaaagagtacccggcaattatcacggagacagaggaagccctttccgagattttgaatggaaagaaattagcagacattttttccgcagacggttttaattcagtcttaagtcagagtggcatcgatttttataataccattattgggggtatagccggagaggcggggacccaaaagttgcaggggatcaacgaaaaaattaatttggcgcgccaacagctgcctacagaagaaaaaaataaattgaagcgtaagatgtcggtgttgtacaaacaaatactttctgaccggtcaaccgcgagctttatccctatcggttttgagtcaagcgatgaagtctatgagtctgtaaaacaattcaaggagcagagcttagacaacgtcatatccgctgctaaggaactgttcgaaaaaagtgactacgatctgtcgcagatttatgtacccgcaaaggaagtaactgatttcagcttaaaactgtttggcaactggagcatcctgcatgacgggttgtttttgatagagaaagataattccaaaaaaaccttcactgagaagcagatcgaaaacttgcgtaaagaaatagccaagacagactgctccttggctgacctgcagaatgcatacgagcgttgggccaaggagaacgacgttaaggccgaaaagacggtgaaaaactattttaagatcgcggaattacgtgcggacggcaaaagtcgggagaaaacttcagtggagatacttaacaagatagaatccacttttgagaagatcgacttcgaaaagcgcgataatctgatcaaagaaaaagaaactgcgaccccaattaaagaattcttagacgaagtccaaaacctgtatcactaccttaagttggtggactatcgtggagaggaacagaaagatactgacttctattcgaagtacgatgagatccttcagactttgtcggaaattgttcccttgtacaacaaagtccgtaacttcgtcactaagaaaccaaacgaagtaaagaaagtcaaattgaactttgacaatgtttcgctggcgaaaggctgggatgtcaataaggagtctgactatacatgtatccttctgcgtcgttcaggcttgtattatcttggggttctgaatcccaaagataaacctaagtttgattcagagaacaacggggagacttcaatcaacaagaatgactgctatgaaaaattggtatataaatactttaaggatgttaccaccatgataccgaaatgctctactcagctgaacgatgtaaaacaacattttaaaaacagtaatgaagattacatcttggaaaataacaactttattaagcccttagttataagtaagcgcatctttgacttgaataacaagactttcgatgaaaaaaagatgtttcagattgattattatcgcaacaccggcgatcttaagggctacaccgaagccgttaaagactggatcagtttctgcatgacgttcgtacactcctacaaatcgacttgcatttatgactttagtagcttaggtgactgctcccagttcaaacaggtcgatcaattctataaggaaattaacttgcttttgtacaaaatatggtttgtaaacgttaccgccgagaaaataaatagtctggtagacagtggtaagctgtttctgtttcagatctacaacaaagattattcgaccggcaaggacggaggaaatggtagcacaggcaaaaagaacctgcatacaatgtattgggagaatttgttttccgaggagaatttgcgggacgtgtgcttaaagcttaacggcgatgccgaactgttttggagagacgcgaatccagatgtgaaagatgtatgtcacaaaaagggttccgtcctggtgaaccgcacgactagtgatggcgagaccataccagaagagatatatcaggagatttacaagtttaaaaaccctaataagcaagaaaaaagcttcaagctgtccgacacagcaaaagaactgttagactctggtaaagtcgggttcaaagaagcaaaatttgatataattaaggaccggcacttcacccagaagacatacctgttccactgcccgataaccatgaacttcaaggcgcccgagattacggggcggaagtttaacgagaaggtccaacaggtcttaaagaataatcctgacgtcaaagttattggcttagatcgcggagagcgtcatctgatctatctttccctgatcaatcagaaaggtgagattgaacttcagaagacgttaaatcttgtcgaacaggttagaaacgataagactgtttcagtaaattatcaagaaaagttggttcaaaaagaaggcgaacgcgggaaagcgagaaagaactggcagactatctctaacatcaaggaattaaaagaggggtacttgtcgaatatagtacacgaaattgccaaattaatggtagagaataacgcgatcgttgtgatggaggacttgaacttcggcttcaagcgggggcggtttgcggtggagagacaagtttaccaaaaattcgagaatatgctgatagagaagcttaactacttagtctttaaagataaaaaagtggcagaacccggcggagtcctgaatgcataccagcttaccgacaaagttgcaaacgtgtcagacgttgggaagcagtgtgggtggattttttacattccagcggcctacacgtctaaaatagaccctaagacaggatttgccaacttattttatacagcagggcttaccaacatagaaaagaagaaagatttcttcgacaagttcgatagtattagatatgaccgcaaaacagattcattcgtctttacttttgattatagcgactttggcgacaatgctgactttaagaaaaagtgggagttatactctagaggggaacgtcttgtcttttccaaagccgaaaaatctgtggttcacgtgaacccgacagaaaacctgaaggctttattcgataagcaaggaattaactggtcgtcagaggataacattatagaccaaatccaagccgtacaagctgaacgtgaaaattgcgcattttacgacggcctgtatagatcttttacggcaatcctgcagatgcgtaatagcgtacctaactccagtaaaggcgaagacgattatcttatctcgccggttatggcggaggatggctctttttatgattcgcgcgaggaggcagaaaagggtaaaactaccgatggaaaatggatatccaaattacccgtagatgcagacgctaacggtgcatatcacatcgccttaaaaggattgtaccttcttcagaacaacttcaatttgaacgaaaacggatatatagaaaacatcagtaacgccgattggtttaaattcgtacaggagaaggaatatgccaaa

SEQ ID NO: 636 - DNA, 3921 bp, synthetic construct
  misc_feature 1..3921: note = Sequence codon optimized for E. coli expression
  source 1..3921: mol_type = other DNA
atgtcaatttatcaggaattcgtcaataagtattcgctgtcaaaaactcttcgtttcgaattgattccacagggcaaaacgttggaaaatataaaagcaagaggtttaatcctggacgacgagaaacgggcgaaagattacaaaaaagcaaagcaaattatagataagtaccatcaattttttattgaagagattctgtcctctgtttgcataagtgaagatttattacagaactacagcgacgtgtattttaagttgaaaaaatcagacgatgataatttgcagaaggacttcaagagcgcgaaagatactattaaaaagcagatctcgaaatacatcaacgattccgagaaatttaaaaacttgttcaaccagaatttaatcgacgctaagaagggtcaagaatctgatttgattctgtggctgaaacagagtaaggataacggcatagagttgttcaaagcaaacagtgacattactgatattgatgaggccttagagatcatcaaatcatttaagggttggacgacatatttcaagggcttccatgagaatcggaaaaacgtctactccagtaacgatatacccactagtataatttaccggattgttgatgacaacttacctaaattcctggagaataaagccaaatacgagtccttaaaggacaaggcccccgaagccattaattatgagcagataaaaaaggacttggcggaagagcttacttttgacatcgactacaaaactagtgaagtaaatcaacgtgtcttttcgttagatgaagtgtttgaaatagcgaattttaataactatttgaatcagtcgggtatcacgaagtttaacaccatcatcggtgggaaattcgttaatggtgagaataccaaacgcaaaggcattaacgagtacataaacttatatagtcagcaaataaatgacaaaacccttaaaaagtacaagatgtcagttctgtttaagcagatcctgtccgacacggagagtaagtcatttgttatagataagctggaagatgattcggacgtagttactaccatgcaaagtttttacgagcaaatagcagctttcaagacagtggaagaaaagtcaataaaagagacgttatcgcttctgttcgacgatttgaaggcacagaagttggacttatcaaaaatctactttaagaatgataagtcgttgaccgacctttctcagcaggttttcgatgactacagtgtaataggaaccgccgtactggagtatattacccaacaggttgctccaaaaaatttggataatccgagtaagaaagaacaagatttaattgcgaagaagactgagaaggcgaagtatttatcactggaaaccatcaaattggcattagaggagtttaacaaacatcgggatattgacaagcagtgtcgctttgaggaaatattgtctaacttcgcggctatcccaatgatatttgatgaaattgcccaaaacaaggataacttagcacagatcagtataaaatatcagaaccagggaaaaaaagatttgcttcaagcaagtgccgaggaagacgtaaaggcgataaaggatcttttagatcaaaccaacaatttattacacagattaaaaatttttcacatttcccagagtgaagataaggcgaacatattggacaaggacgaacatttctatctggtatttgaagaatgctactttgaactggcgaacatcgttcctctgtacaataagatacgtaattacataacccaaaagccatacagtgacgaaaagtttaaacttaacttcgagaattccacgttggcctcgggatgggacaaaaacaaggagtccgcgaacactgcaattttattcataaaagacgacaaatattatctgggtataatggataagaaacataataagatttttagtgataaagccatagaggagaacaaaggagaaggctataaaaaaattgtgtataaacagattgcggatgcgagcaaagatatacaaaacttgatgataatagacggaaagactgtatgcaaaaaaggtcggaaagacagaaatggtgtaaatcggcaattattgagcttgaaacgcaagcacttaccagaaaatatttaccggattaaggaaaccaaatcttatttaaaaaatgaggctcgcttttcccgtaaagatttgtatgacttcatagactattacaaagacagattggactactacgattttgaattcgaactgaaaccgagtaacgagtatagtgacttcaacgatttcacgaatcacatcggctcgcagggttataaattaacttttgagaacataagccaagactatatcaatagtttggtgaacgaaggaaaattatacttatttcagatctactctaaggactttagtgcttacagcaaggggcggccgaatcttcacactctgtactggaaggcgctttttgatgagcgcaacctgcaagacgtggtttataaacttaatggggaagcggagttattctatcggaaacagtctataccaaagaaaatcacgcacccggccaaggagactattgcaaataaaaataaggataatcctaaaaaagagtcggttttcgaatatgaccttattaaggataaacggttcactgaggataaattcttttttcattgcccaatcacgattaatttcaagagctcgggagccaataaatttaatgacgaaataaatttacttctgaaagagaaagccaacgatgtacatatattgtctattgaccgtggcgagcggcacttagcgtattatacccttgtggacgggaaggggaatattattaagcaggataacttcaacattatcggtaacgaccgcatgaaaacaaattatcatgataagttggcagctatagagaaggaccgtgattcagcccgcaaggattggaaaaagatcaacaatatcaaggagatgaaggaggggtatctgtcccaggtggtgcacgaaatagcgaaactggttatagaatacaacgcaattgtcgtcttcgaagatttgaactttggtttcaagcgtggtagattcaaggtagagaaacaagtttaccagaaacttgagaaaatgttaatcgaaaagcttaattatctggtcttcaaggataacgaattcgataaaactggtggcgttttgcgtgcctaccagctgacggcccctttcgaaacttttaagaagatgggaaagcaaacgggaattatatactacgttccggccggttttacgtctaagatctgtcctgtcaccggctttgtgaaccagctgtatccaaagtatgagagcgtcagcaaaagtcaggagtttttttcgaagtttgataaaatttgctataaccttgataaaggttactttgagttttccttcgactacaaaaatttcggcgataaagcggcaaaagggaagtggacaattgcgagcttcgggagccgcctgataaattttcggaacagcgataaaaatcacaactgggacacgcgggaagtatacccaaccaaagagcttgagaaattgttaaaggactattccatagaatatggccatggagagtgtatcaaggcggctatttgcggagaatctgacaagaaattttttgcaaagttgacatctgtcttgaacactatattgcaaatgcgtaatagtaaaacgggtactgaattagactaccttatttcaccagttgcggatgtgaacggcaatttttttgactctcgtcaggcgccgaagaatatgccgcaagacgcggatgcgaacggagcataccatattgggttgaaaggccttatgcttttagatcgtattaaaaataaccaagaaggtaagaaattgaacctggttataaagaatgaagaatactttgaatttgttcagaaccgcaacaat

SEQ ID NO: 637 - DNA, 3939 bp, synthetic construct
  misc_feature 1..3939: note = Sequence codon optimized for E. coli expression
  source 1..3939: mol_type = other DNA
atgaaagcggaaacaaatcttaccgaacttgttaatctttattctctgcaaaagacgcttcggttcgagttgataccccaaggtgagacattgcaaaatatagagaaaatggggattttaacacaggataatcagcgtaccgacgattatgagaaggtgaagacaatcatcgacgagtatcacaagcgcttcatagaaatatgcttcaaagatttcgtcttagaagacttggacaaataccaagagttgtacatcaccaaaaaccggtctgagcaggaaaacactgagttccagaaactgaaaacaaatctgagaaaacaggtagtgaaccggttcaaagaaaacgataagcttaaacggctgtttagcaaagaatttataaaagaggatcttgtcgaatatctggatggccgggacgaagataaaaccagagtcgagcggtttaaggattttacaacttactttacaggcttcttcgagaatcgtaaaaatatgtattctgatggggaacaatctacggcaatcgcgtatcgtttgatccacgagaatttgcctaaattcatagataacctgtccatatttaacaaaatcgtagagcggaacgagattaagacaaagtttagtaccatcgttaatgacttaaattgccacttacactcgccgatcaactcgattgaagaagtatttacaattgattattttaacaagacattatcacagaagcagatagaggactacaacacaattattggtggtgtttccaaaaataacgaaaaggttcaaggacttaacgaatatataaacctttataaccaacaacaaaaagacaagtcgaatcgcttacccttgctgaaaaaattgttcaagcagattttgtccgatcgggaacccattagttggctgcctgaggagttaagttcagacaaggacatggctaattctgtacttaacttatataaagaagtttacgaaattatatactcaaacgacaatagtttatacaatttgattacgtacatagacaattacgatcttagcaagatctacatttcaaatgaccaatcattgactactttgagtcaaagaatatacaatcgttacgacatttacactttcgctatcaaacaaacccttaaggaactgaatagacaaaaaagaaaggagaatatcgaaaaatatgaggctagaatcgataacctttttgaaaattgcgaaagtttcagcattgaggagctgaacaacatcgtcaaaaacacatacaaagagaatgaggaaattgacacgtccaagaccatagagcagtacttcaaggatttcggggcaatcaacaaggagcatatccagaaagaaaaccttatactgcagcttgagaacgcctttacggtagccaaacctatattagaggcaatcgacgacaataacaagggaatttcacaagataaggatgccgtcgacaagattaagaacttgctggatgtattaaaggatattcagcacttcgttaagccgttgttaggatctaatatcgaagccgacaaggatgaaaatttctacggatccttctcagacatttaccaacgtttggacaaaatcacgcccatttataatatggtgcgtaattatttgacaaaaaaaccttattccgaagagaagatcaagttgaatttcgagaagggcaaccttttaaacggctggatcgactcctacaccgaaaaaagtgataatggaacccagtactctggatatctttttcgcaagctgaatagtatcggtgagtatgactactacctggggatctcgcttgatacgaaattattccgtaatacagacaatgtcgaggaaaatgataagagtgaatttgaacggctggattattaccaattgaagtcacagacattcttcggaaatagttacaagggaaagcaaacttacaataaggacaaagaggatatgatcacgattattgatgattttattgaacgcctgccgaacattcacccacttaaggaacggtcgaaaaataaacccgatacttttaccccaaatcagtacctgacttacttcaaaaactatcaggaggagtacaactgtttattgaaggataagaagtttaaaaacaagaatgaagagttgattaagaacatcatagagaccatcaagtcgataaatcgtttgccgaaagataagataaaggcaataatatcgaagaattatacggtgttctcagagatcatatctgacatccaagacaccctgttgaaagagaagatattcaattacatcagtgtcagtaaaaaggccatggaagctgcggcgaaacgtgagcagaaaactttatacttattcaagattagtaataaagacttatcttacgcggacacccacagcaagggtgatcgtaagagccggggaaccgagaaccttcataccatctattttaagacacttatgagtggggagcagaacgtgttggatattggggccggtgctatcttctaccgtaagaaaaccgagtggctgaagagttcaccgacgcacaaagctaacgaaaaaattcagaataagaatagtcacactaagtccgaatttgaatatggacttatcaaagacaagagatatatagaaaacaaatttctgttccacttgtccttgactttaaactatcagtcaaagggcattaaaaatattaatcctatagttaacaacatgatacggaataaggaaataaagcacatcataggtatagaccggggagagcgtaacctgttgtacttgtctcttattgacctgaaggggaatatagtcaaacagatgtctttaaatgaaataatcaatgaatacaatggtaataagtacaagactgattaccacgatttgttagctaagaaggaggaagaacgtaagaaagctagattgtcatggggaacaatcgaaaatatcaaggaactgaaagatggttatatatcacaggtggtacacataatctcccaaatgatcgtgaaatacaacgccatagtagttcttgaggacctgaacttcggtttcatgcgggggcgtcaaaagattgagaaacaagtataccaaaagttcgagaaaaagcttatcgacaagcttaattactacgtcgataaacaaaagaactccaacgaaattggggggcttttccatgcattacaattgacgaacaagttcgaatccttcaaagacatggagaagcagaacgggtgtctgttttatatacccgcatggaatacgtcgaagattgatcctgtaacagggtttgtaaatatgtttgatacaagctactgcagcgtgaaagaatctaaggtcttcttctcgaaatttgacacgatcagatataatgcgaaagatgatttatttgaattcgcgtttgattacgataactttaccactaaagctcaaggcactaaaactcaatggacgttatgttcatttggtcagcgtatcgaaatctttcgtaacaaagagaagaataacacctgggataacaaagaaatcaatatcaacgacgagttcaaacaattattcaacgaattcaacatcgatattaacataaacgacaacttaaagcaagagatacaaaagcagactagtgcagaatttttcaaacggatcatgcacttaatgaagttgcttcttcaaatccggaattcgataactggcagcaccgaaaaaaacgatgattacataatttctccggtcgcggacgagaacggcgttttcttcgattcgagaaaggtgaacgaaccggataacttgcctatagatgcggatgccaacggcgcgtataacatcgcgcgcaaaggcctttgggtcgtccgccagatacaaaataccaaagacgaagataagataaacttagctataagtaataaaggttggttgaattttgtacaacagaagctgtatcttaatgac

SEQ ID NO: 638 - DNA, 3429 bp, synthetic construct
  misc_feature 1..3429: note = Sequence codon optimized for E. coli expression
  source 1..3429: mol_type = other DNA
atgaccaatctgtatccgattgaaaaaaccgtttgttttgaactgcgtccgattggtaataccctggaacatttttataagaatgaaattatcgaaaaagcacagaatcgtagcgatgaatttcgtgagattaaacatctgattgatccgattcataaagagattattgaggaatgttttcaggaactgagcgaaaatagcgaatttacccgtctgctggaaaaatatgaatttaagccgcatgttattaatagcaaaaaaccgctgccgcgtgataaaaagctgattgaagaaaacatttataacaagaaggaaattgtggaaattgtgaaggatacctttcgtcataatcctaaatataagctgatttttagcgataaaaaaatcgacatgctgaaagaatactataaagatgattgtgagaaattcgaactgattagccattttgaagaatttgcaagctattttgaaaagtacgacattaaactgaagaacatttatggttgtgaaggtaaaattagcaatacctgcaaaagcattctgaaccgtctgattaccgataacctgccgattttttactttaacaccaaaaagaatatcctgaccaaagttaaattcagcgcaagctttgaaaatgttaaatacattgataagtttgccagctattttagcattagcggtattgagaaatataacaaaatcattggtaacattaacgatgccgttaataagctgaatcagaaaggtaaaaagtatagctatctgggtaaaatgaaagatatttttgatctggatcagtatagcgatattgtgaaaaagatcagcgatgacaaagagctggttgaaattattaatatttttattgacggtcaggatatcgaagagctgaaaaatacctttagcaatctgaatgataaatacaatctgaagaagatctttgttcgtcgtggtaaagaactggatgatctgctgaaacgtattgattttaaaggtcgtgcacgtctgaccaccagctatgtgaacctgttttatattgatagcattaatcgtaacaaagttaagatttacgaggcaatcagcgttaagattaacgaactggttgatgattacatcaaaaaatatgaagacgttaagtatatcctgacagcaaaatatgatagcggtaccaaaattctgggtcagaatgataagaacattgcaaagattaaggaactgctggaaagcattaaagcaatttatgattttgtttctatttttatcccgaagaaggcagaaaatcgtgataacattgattacgaaaaagtgaacttcgatatctacaataagattaactttgaacgtctgagcattatcaaccagattttcaatcatttcaaagattacttcaccctgaaaaattttagcaccaaaaaaattcgtctgaattttaacgtggaacagctgctgaatacctgggatattgataaaattgacgaaaccctgggtaccatcctgctgaaagaggaagaagaaaaaaccaaatattatctgggtattctgaatagcagcaattatagcaagttcgaatataccgatgttaaagaaaataactatcgtcagatgatttataccagccagagcgaagaagaaaagaataagaactacaagatcagctttaagtatattaatagcgcaaaaattgatgaaatggtggaaaaagatgaaatgtatctgtttcagatttataataaggacttcagcagctatagcaatggtaactataagttaaataccatgtattggaataacatctttgacagcaacaacatcgagaatattatttttaatattgcaggtggtgcaaccattttttttcgtgcaaaaagcctggaacgtcgtgaaacccataaacagggtgaagttctgagcaataaaaataaagataatcagaaaaccaccagcatttttagctatccgctgattaaaaataaacgttataccgaagataaaatcaaactgcatgttccgattgaaattaattgtaatagcaagaatctgaatcagcgtaaactgaactatcgtgttaacaagaatattcagaacctgaaagaagttaatattattggcatcagccgtggtacaaatgatctgctgtatgcaaccgttattaattctaaaggtgagattattgaacagaccagcctgggtaaaattaaaaatgttgtttttgacaagagcattaatgcaacccgtgaaattattagcgattataacaaaattatcgataccaaagagaaagaacgtgaaaatgcaaataatcgtaataaaaccggtgaggaactgaatctggaaaaaagcatcaaagatattaaaaatggttatatcagccaggcagttaatgttattgcaaatctggtgaaaaagtacaatgcaattatcgttttcgaggatttaaatgataagaaaagcgaaaagattgagagcaaaattgaaaaatccatttaccgtaatattcagaatgcagttattaccaagctgagctatctggttgacaaaaaaaagaaagataaattcgccgaaggtagcattctgaatggttatcagctgacctattattgtgaacaggatctggttgaaaaacaggaagatagcgaagaaaaacagaatggtattgttttttatgttagcacctatatgaccaccaatattgatccgaaaaccggttttgttaattgttttagcgttagcctgccgaaaagcattgatggtgttaaggacttcctggaaaaattcaaagagattaagttcaataccaaagaaggctattatgagttcgttgttaattacgaaaacattagcaaatatacccgttattttattggcgaaaaactgagcaaaaaagaatgggttatttgtagctatggtgatcgtattgaagaatctaaagatattaataccggtaaaaccaaatacaagaagattgacctgaccaaagaatttaaatgtctgtttgaaaaattcaatatcggccagggtaaaaaactgaaaaccaacattattaaattcctggaaaatctggatctgggtagcggtctgcaggcaaaaattaagggtaccaatcgttttatcaataaacagagcattcagcaggaagaattttgtcgtgaatttatgcgtctgtttgcactgattctgaaactgcagaatagcgatggtaaagaaagctatattattagcccggttaaagattctgatggtaaattttttgatagccgtaaacataatgaatacagcagcattgttccggaaaatgaaattagcaattcagcatataatattgcccgtaaaggcctgctgattattaatcgtattaaaaaaaccaaagaactggaacgtattgacctgaatctgcgtgatgaatattggctgaattttgttcagaataataat

SEQ ID NO: 639 - DNA, 3888 bp, synthetic construct
  misc_feature 1..3888: note = Sequence codon optimized for E. coli expression
  source 1..3888: mol_type = other DNA
atgaaaggtgcaaaaatgggttatgagaattttattaataagaatagctgcgttaagaccctggttaatgaactgcgtccgaccgaatggacccgtaaacatattgaagaagatgcaattctgagcgcagatgaactgcgtgcagaagaaagcgataaactgaaaagcattatggatgattattatcgtcgttacatttacaccaaactgagcggtgttagcagcctggattgggatgaactgtttagcattatggaagttgcatataaaagcggtaagaaagacaagaattgtaaagcacagctggaaaaagttcaggaagaaatgcgtggtaagttctacaatgttctgagcgatgatgatatttttaaaatgatgttcagcggtaaattcgttaccaaagttctgccggaatttgttcgtaataataaagaatatagcgcagaagagaaacagcagaaactggataccctgaaactgtttaaaggttttaccaccagcctggttccgttttttaataaccgtgaaaatatttttagcaaaaaaccgattcacagcagcatttgtcatcgtaccgttgatgaaaataccgcaattttttatcagaacattatcagctataagaacattgaagataatgcaccgcaggaaattgaaaaaattgaacatcagggtcgtcagcagctggatgaatggaaactgccggatatttatagctatagcttttataataatgttttaacccagcagggtattgaattttacaacgatatttgtggtattgttaacagccatatgaatctgtattgtcagcagaccaaagaaaaaagcggtcagtatcgtatgcgtaaactgtataaacagattctgagcattagcagcaccagctatgaagttccgtataaatatgaagatgatgcccaggtttatagcagcattaatgaatttgttgaccgcatttttaatagcaattttagcgcaaaagttgaaaaaatgctgggtaaagcagaagaatatgattttgataagatttacattagcagcaaaaactatagcagcatcagcaattttattagcggtaaatggaataccctggatgattgtattcgtcgttattatgaagataataccgttggtaatggtgacaaaaaagaaaaaaaagttgaagagaaagttaaaaaggacagctttcgtagcctggatagcattgataaagttgttgaaatgtatgaaaaacgtggtaaaagcgcaaaagaatatatttaccagattcgtgaaatctatagcgataataagctgtataaatttggtcaggatggtagcgataccgttaaactgattgaaaatgacgcaaaaattgaacgtatcaaatgtgttctggatatgctgctgaataccaatcgttttctggatacctttgcagttggtgatggtgaagcagttgatgttggtttttatagcgaaattgatgaactgaaagaaattattgatggtattgaaccgctgtataatcgtgttcgtaattatgtgacccgtaaaccgtataataagaataagatcaaactgaattttaatagcccgaccctggcagaaggttggagcaaaagcaaagaatatgatgataatgcaattattctgcgtcgtgatggtaaatattatctgggtatttttaatgttaagaataagccggataagaagattatggaaggttatagcggtgatgttggtgatggctatgagaaaatggtttatagcctgctgagcaatattcatagcaattttccgcgtatttttattaaaagcgatgaatgtgagaaaaaatacaagctgagccagtatattatcgatggttatgataatgatcgtcacatcaaaagctccaaaaactttgatatcaagttttgtcacgatctgattgattattttaaagcaagcattaatgcaaatccggattggaaagtttttgattttaaattcagcgataccaaaagctatgaagatattagcggtttttattctgaagttgaaaagcagggttataagatcagctgggttaatattagcaaagaagatattgatcgtctggatgaaaccggtcagatttatctgtttcagatttataataaagactttagcgaaagcagcatgggtaccccgaatctgcataccctgtattttaaaaatctgtttagcgaagaaaatatccgtgaaaccgttctgaaactgagtggtaaaggtgaactgttttttcgtaaagcatctattgataaaccgagcggtcatcgtaaaggtagcattctggttaataaaacctataaaaccaatattggtaatgaagaagttcgtgttccgattccggataaagaatacatggaaatttatacctatctgaataatggtcgtaccaccaaactgtctgaaaatgcacagagcctgctggataataaactggttgaatattttgaagcagagaaagagattatcaaagatcgtcgttataccgttgataaatttttcatccacaccagcgttgttattaattataatgcagaaggtgcaagcgcaaaacagctgaatgagcaggttctggattatattagcaaacaggatgatatgcatattattggtattgatcgtggtgaacgtaatctggtttatgttagcgttattgatatgaaaggtcgtattgttgaacagaaaagctataatgttgttaactcttatagctatcagaaaaaacttgttgaacgtgaaaaagcacgtgatgaagcacgtaaaagctggaaagaagttggtcgtattaaagatctgaaagatggttatctgagcctggttgttcatgaaattgcagatatggttattaagtataacgcaattattgcaatggaagacctgaattatggttttaaacgtggtcgttttaaaattgagcgtcaggtttatcagaaatttgaaagcatgctgattagcaaactgagctatctggttgataaaaccaaaaaagttgatgaaccgggtggtgttctgaaaggttatcagctggcatttgttccgaaagaagttaaaaaagttggtcgtcagtgtggtattattttttatgttccgccggcatataccagcaaaattgatccggcaaccggttttgttgatatgtttaaatttaaaagcggtgaaaaagaaggtaccgcacgtgcagacaatgatcgtaaagagttcctgagcaaatttgattgcattcgttatgttgaaaaaaatgataaccgtgaagaaatgtttgcatttaccttcgactatgataattttgcaatgcacaataccgttattgccaaaaaaaagtggaccgcatatacctttggtagccgtattcagaaagtttatgaaaatggtcgttataccagcagcacccgtgaaattcagctgaccgataaaatgaaacgtctgctgaatgaaaacaatattgaatacggtgatggtcataatctggttgatgatattcgtaccctggatgttgatagcagcggtgcagttattaatgaaatttttaagattttccgtctgaccgttcagctgcgtaatagcaaaagcgaagcagaaaatgaaaaaaatggtgaatatgatcgtattatcagcccgatcatgaatgacgcaggtgaattttttgatagctttaagtataaaaaaatgaatgaagagaccgaaccgggtaaacataatgcaaccatgccgattgatgcagatgcaaatggtgcatattgtattgcaatgaaatgtctgtatgaagccaaaaatattaaaagcggttgggaaaaagaaggcaaaaagaataatgatctgctgtgtgttaccaatgcagattggtttgattttatgcagaataaacgttatgtt

SEQ ID NO: 640 - DNA, 3756 bp, synthetic construct
  misc_feature 1..3756: note = Sequence codon optimized for E. coli expression
  source 1..3756: mol_type = other DNA
atgaataatctgaaacagtttattggtatttatccggttagcaaaaccctgcgttttgaactgcgtccgattggtaaaacccaggaatggattgaaattaataaagttctggaaggtgatgttcagaaagcagcagattatccgaccgttaaaaagctgattgatgaataccataagatttgtattcatgatagcctgaaaaatgttcattttgattgggcaccgctgaaagaagcaattgttatttttcagaagaccaaaagcgatgaaagcaagaaacgtctggaagcagaacagaccattatgcgtaagcagattgcagccgccattaaagattttaaacattttaaagagctgaccgcagcaaccccgagcgatctgattaccagcgttctgccggaatttagcgatgatgattctctgatgagctttcgtggttttgccacctattttagcggttttcaggaaaatcgtattaatatttatagccaggaaagcattagcaccggtgttccgtatcgtattgttcatgataattttccgaaatttctgagcaatcaggaagtttatgatcgtattcgtagcgtttgtccggaagttattaaacaggcaagcgaagaactgcagccgtttctggagggtgttatgattgatgacatctttagcctggatttctacaacagcctgctgacccaggatggtattgatttttataatcgtgttattggtggtgttagcgaagaaggtaagcagaaatatcgtggtattaatgagttcagcaatctgtatcgtcagcagcataaagatctggcagcaagcaaaaaagcaatgaccatgattccgctgtttaaacagattctgagcgatcgtgaaaccctgagctatattccggttcagattgaaagcgaagatgaactggttagctctattaaacagttttatgaacatattacccattttgaacgtgatggtaaaaccgttaatgttctgagcgaactggttgcagttctgggtaatattgatagctataatccggatggtatttgtattagcgcaagcaaactgaccgatattagccagaaagtttatggtaagtggagcattattgaagagaaactgaaagaaaaagcaattatgcagtatggtgatattagcgttgcaaaaaataagaaaaaggttgatgcatatctgagccgtaaagcatattgtctgagcgacctgtgttttgatgaagttgttagctttagccgttattatagcgaactgccgcagatgctgaatgcaattaatggttattggatgcagtttaatgaatggtgtcgtagcgatgaaaaacagaaatttctgaataatccgatgggtaccgaagttgttaaatgtctgctggatgcaatgatggaactgtatcataaaagcgcagttctggttatgccggaagaatacgaggttgataaaagcttttacaatgaatttattccgctgtatgaagaactggataccctgtttctgctgtataataaagttcgtaattatctgacccgtaaaccgagcgatgttaaaaaatttaaactgaattttgaaagcccgagcctggcaagcggttgggatcagaataaagaaatgaagaacaatgccattctgctgtttaaagatggtaaaagctatctgggtgttctgaatgcaaaaaacaaagcaaaaattaaggatgcaaaaggtgatgcaagcagcagcagctataagaagatgatttataagctgctgagcgatccgagcaaagatctgccgcataaactgtttgcaaaaggcaatctggatttttataaaccgtctgaatatattctggaaggtcgtgaactgggtaaatacaaaaaaggtccgaatttcgacaaaaaattcctgcatgattttattgatttctataaagcagcaattgcaattgatccggattggagcaaatttaattttcagtatagcccgaccgaaagctatgaagatattggtgcatttttcagcgaaattaaaaaacaggcatacaaaattcgttttaccgatattaccgaaagccaggttaatgaatgggtggataatggtcagctgtatctgtttcagttatataataaagattatgcagaaggtgcacatggtcgtaaaaatctgcataccctgtattgggaaaacctgtttaccgatgaaaatctgagcaatctggttctgaaactgaatggtcaggcagaactgttttgtcgtccgcagagcattaaaaaaccggttagccataaaattggtagcaaaatgctgaatcgtcgtgataaaagcggtatgccgattccggagaacatttaccgtagcctgtatcagttttataatggtaaaaaaaaggaaagcgaactgaccaccgcagaaaaacagtatatggatcaggttattgttaaagatgttacccatgaaattattaaagatcgtcgttatacccgtcaggaatatttttttcatgttccgctgaccctgaatgcaaatgcagatggtaatgagtacattaacgaacaggttttaaactatctgaaatataatcctgatgtgaatattattggtatcgaccgtggtgaacgtcatctgatttatctgaccctgattaatcagcgtggtgagatcattaaacagaagacctttaatattgttaacaactacaattaccaggttaaactggaacagcgtgaaaaagaacgtgatgaagcacgtaaaagctgggatagcgttggtaaaattaaagatctgaaagaaggttttctgagcgcagttattcatgaaattaccaaaatgatgatcgaaaataacgcaattgtggttctggaagatctgaattttggttttaaacgtggtcgttttaaagttgaacgtcaggtttatcagaaatttgaaaaaatgctgattgacaagctgaactatctgagctttaaagatcgtgaagttggtgaagaaggtggtattctgcgtggttatcagatggcacagaaatttgttagctttcagcgtctgggtaaacagagcggttttctgttttatattccggcagcatataccagcaaaattgatccggttaccggttttgttaatcattttaattttaacgatattaccaatgcagagaaacgcaaagatttcctgatgaaaatggaacgtattgaaatgaagaatggttatattgaattcacctttgactatcgtaaatttaagacctatcagaccgattatcagaatgtttggaccgttagcacctttggtaaacgtattgttatgcgtattgatgaaaagggttataaaaaaatggttgattacgaaccgaccaatgatattatctatgcattcaaaaataaaggtatcttactgagcgaaggtagcgatctgaaagcactgattgcagatgttgaagcaaatgcaaccaatgcaggtttttttggcaccctgctgtatgcatttcagaaaacactgcagatgcgtaatagcaatgcactgaccgaagaagattttattctgagcccggttgcaaaagatggtcatcatttttgtagcaccgatgaagcaaataaaggtcgtgatgcacagggtaattgggttagccgtctgccggttgatgcagatgcaaatggtgcatatcatattgcactgaaaggtctgtatctgctgcgtaatccggagaccaagaaaattgaaaacgaaaaatggttccagtttatggttgaaaaaccgtatctggaa

SEQ ID NO: 641 - DNA, 3777 bp, synthetic construct
  misc_feature 1..3777: note = Sequence codon optimized for E. coli expression
  source 1..3777: mol_type = other DNA
atggaaagcaataataaaatttttaccgaaaccattggtaccagcagcattgcaaaaaccatgcgtaatagcctggttccgaccgaaagcaccaaacgtaatattgaaaagaatggtattattatcgatgatcagctgcgtgcagaaaaacgtcagcagctgaaagaaattatggatgaatactatcgtacctacattgataataaactgagcaatgttgcactgacccgtaccattgattggaaagagctgtttcaggcaattgaagacaattataaacagaataccaccaaaaccaaaaatgaactggaaaaaaagcagaaagaaaaacgtaccgaaatttacaaaattctgagcgatgatgaaaaatttaagcagctgtttaatgcaaaactgctgaccaatgttctgccggagttcattaagaatcagaacattgacaatgaagaaaaacaggaaaaaattagcaccgttgaactgtttcagcgttttaccagcagcttcaccgactttttcaaaaatcgtaaaaatgtttttagcaaagatgaaatcagcaccagcatttgttatcgtgttgttcaggaaaatgcatggattttttatcagaatctgctggcatttgaagaaattaaaaaaaccgcagaacaggaaattgagaaaattgaagcagaaaatcgtgatagcattagcgattatagcctgaaagaaatctttgattttgatttttatggtctgctgctgaatcagggtggtattcgtttttataatgatgtttgtggtaaaatcaattatcacatgaacctgtatggtcagaaacataatatcaagagcaataagtttaagatgaagcgtatgcataaacagattctgagcattgatgaaagcacctttgaagttccgaccatgtttgaaaacgataaggaagtttatcaggttctgaatgaatttctgagcgatctggcaagcaaaaaaattctggaacgtgttgaaaaaattggtgaaaatgttagcgaatacgaaattaacaagatctacattcagagcaaaaatttcgaaaagtttagcagctttatgtgtggtaattggcagatcattaacgatagcctgaaaacctattataatgaaaaaatcaaaagcaagggtaaagcaaaagaagaaaaggttaaaaaggccattaaagcaattgaatataaaagcctggcagatattaatcagctggttgaacgttataataatgatgaactgaatcgtaaagcagaagaatatattagcgcaattaatgaaaagattaaagatctggatgttaacgaaatcgaatatgatgagaagatcaacctgattgaaaatgaaaccaaaagcgaagagattaaaagcaaactggatagcattatggaaatcatgcattggaccaaaatgtttattattgaagaagaaatcgagaaagacgtgaacttttacaatgaaattgaggaaatttatgatgagctgcagccgctggttaccatttataatcgtattcgtaattatgttacccagaaaccgtatagcgaagaaaaaattaaactgaattttggtattccgaccctggcaaatggttggagcaaaaccaaagaatatgataataatgcaatcatcatgattcgtgatggtaagtattacctgggtatttttaatgccaaaaataagccggataaaaaaattatggaaggtcatcagagcgaagaaaatggtgattataaaaaaatgatctaccgtctgctgccgggtccgaataaaatgctgccgaaagtttttatgagcaaaaccggtattgcagaatataaaccgagccagtatattctggaatgttatgaacagaacaagcacattaaaagcgacaaaaattttgatattaagttctgtcgtgacctgattgacttttttaaaaccagcattaatcgtcatccggaatggagcaaatttaattttaaatttagcgaaaccagcgaatatgaagatatcagcaccttttatcgtgaagttgaaaaacagggttataaaattgaatggacctatattagcgaaaaagaaattaaagaactggatgaaaacggtcagctgtatctgtttcagatttataataaagattttagcgaaaaaagcaaaggcaaagagaatctgcataccatgtatctgaaaaatctgtttagcgaggaaaatctgaaaaatattgtgctgaaactgaatggtgaagcagaagtttttttccgtaaaagcagcattaaaaaaccgattattcacaagaaaggtagcgttctggttaataaaacctataatgaaaatggtgaacgtaaaagcattccggaagaacagtatacagaaatttataaatacctgaatagcattggtacaaatgagctgagcgaaaaatcaaaaaaactgatggaagaaggtaaagttgaatattacaaagcaaattatgacatcgtgaaagattatcgttatagcgttgataagttttttattcacctgccgatgaccattaattttaaagcagcaggttttagcccgattaataatattgcactgaaaaatatcgcactgaaagacgatatgcatattattggtattgatcgtggtgagcgtaatctgatttatgttagcgttattgataccaaaggtaatattgttgaacagcgtaattttaacatcgtgaatggtattgactacaaggaaaaactgaaacagaaagaactggaccgtgataatgcacgtaaaaattggaaagaaattggtaaaattaaagacctgaaagaaggttatctgagcctggttgttcatgagattgcaaagctggttgtgaaatataatgcaattattacaatggaagacctgaatcagggctttaaacgtggtcgttttaaagttgaacgtcaggtttatcagaagtttgagaccatgctgattaataaactgaattatctggttgataaagatctggcagttgatcaggaaggtggtctgctgcgtggttatcagctgacctatattccggaaagcctgaaagttctgggtcgtcagtgtggttatattttttatgttccggcagcatataccagcaaaattgatccgaccaccggttttgttgcaatttttaattataagggcatgaccgataaagattttgttaccagctttgatagcattaaatatgatgacgaacgtggtctgtttgcatttgaatttgactatgaaaattttgttacccataaagttgagatggcacgtaataaatggaccgtttatacctacggtgaacgtattaaacgtaaatttaaaaatggtagctgggataccgcagaaaaagttgatctgacctatcagatgcgtagcattctggaaaaatacgaaattgagtataacaagggtcaggatattctggaacagattgaagaattagatgaaaaagcacagaacggtatttgtaaggagattaaatacctggttaaagatattgttcagatgcgtaattctctgccggataatgcagcagaagattacgatgcaattatttctccggttattaataataatggcgaattttttgatagcacccgtggtgatgaagataaaccgctggatgcagatgcaaatggtgcatattgtattgcacttaaaggtctgtatgaagttatgcagattaaaaaaaactggaatgaagaaaccgaatttccgcgtaaagagctgaaaattcgtcatcaggattggtttgattttattcagaataaacgttatctg

SEQ ID NO: 642 - DNA, 3777 bp, synthetic construct
  misc_feature 1..3777: note = Sequence codon optimized for E. coli expression
  source 1..3777: mol_type = other DNA
atgaactataaaaccggtctggaagactttattggtaaagaaagcctgagcaaaaccctgcgtaatgcactgattccgaccgaaagcaccaaaattcatatggaagaaatgggtgttattcgtgatgatgaactgcgtgcagaaaaacagcaggaactgaaagaaattatggatgattattaccgtacctttattgaagaaaaactgggtcagattcagggtattcagtggaatagcctgtttcagaaaatggaagaaacaatggaagatattagcgttcgtaaagatctggataaaattcagaatgaaaaacgtaaagaaatttgttgctatttcaccagcgataaacgttttaaagatctgttcaatgcaaagctgattaccgatattctgccgaattttattaaagataataaggagtacaccgaagaagaaaaggcagaaaaagaacagacccgtgttctgtttcagcgttttgcaaccgcatttaccaattattttaatcagcgtcgtaataattttagcgaagacaatattagcaccgcaattagctttcgtattgttaatgagaatagcgagattcatctgcagaatatgcgtgcatttcagcgtattgaacagcagtatccggaagaagtttgtggtatggaagaagaatataaggatatgctgcaggaatggcagatgaaacatatttatagcgttgatttttatgatcgtgaactgacccagccgggtattgaatattataatggtatttgtggtaaaattaatgagcacatgaaccagttttgtcagaaaaatcggattaataagaatgatttccgtatgaaaaaactgcataaacagatcctgtgtaaaaaaagcagctattatgaaattccgtttcgttttgaaagcgatcaggaagtttatgatgcactgaatgagtttattaagaccatgaaaaaaaaggaaattattcgtcgttgtgttcatctgggtcaggaatgtgatgattatgatctgggtaaaatttatatcagcagcaataaatatgagcagattagcaatgcactgtatggtagctgggataccattcgtaaatgtattaaagaagaatacatggatgcactgccgggtaaaggtgaaaaaaaagaagagaaagcagaagcagcagcaaaaaaggaagaataccgtagcattgcagatattgataaaattattagcctgtatggttctgaaatggatcgtaccattagcgcaaaaaaatgtattaccgaaatttgtgatatggcaggtcagattagcattgatccgctggtttgtaatagcgatattaaactgctgcagaataaagaaaaaaccaccgaaattaaaaccattctggatagctttctgcatgtttatcagtggggtcagacctttattgttagcgatattatcgaaaaagatagctatttttacagcgaactggaagatgttctggaagattttgaaggtattaccaccctgtataatcatgttcgtagctatgttacccagaaaccgtatagcaccgttaaatttaaactgcattttggtagcccgaccctggcaaatggttggagccagagcaaagaatatgacaacaatgcaatcctgctgatgcgtgatcagaaattttatctgggtatttttaatgttcgtaataaaccggataaacagattattaaaggtcatgaaaaagaagaaaaaggcgactataagaaaatgatttacaatctgctgccgggtccgagcaaaatgctgccgaaagtttttattaccagccgtagcggtcaggaaacctataaaccgagcaaacatattctggatggttataatgaaaaacgccatattaaaagcagcccgaaatttgatctgggttattgttgggatctgattgattattataaagaatgtattcataagcatccggattggaaaaactacgattttcacttcagcgataccaaagattatgaagatatttctggtttttatcgtgaagttgaaatgcagggttatcagattaaatggacctatattagcgcagatgaaattcagaaactggatgaaaaaggtcagattttcctgtttcagatttataataaagactttagcgttcatagcaccggtaaagataatctgcataccatgtatctgaaaaacctgtttagcgaagaaaatctgaaagatattgtgctgaaactgaatggtgaagcagaactgttttttcgtaaagcaagcattaaaaccccgattgttcataaaaaaggtagcgttctggttaatcgtagctatacccagaccgttggtaataaagaaattcgtgttagcattccggaagaatactataccgaaatttacaattatctgaatcatattggtaaaggtaagctgagcagcgaagcacagcgttatctggatgaaggtaaaattaaaagctttaccgcaaccaaagatattgttaaaaattaccgttattgctgcgatcactattttctgcatctgccgattaccattaattttaaagcaaaaagcgatgttgcagttaatgaacgtaccctggcatatattgccaaaaaagaagatattcatattattggtattgaccgtggtgaacgtaacctgctgtatattagcgttgttgatgttcatggtaatattcgtgaacagcgtagctttaatattgttaatggttatgattatcagcagaaactgaaagatcgtgagaaaagccgtgatgcagcacgtaaaaattgggaagaaattgaaaaaatcaaagaactgaaagagggttatctgagcatggttattcattatattgcacagctggttgttaaatataatgcagtggttgcaatggaggatctgaattatggttttaaaaccggtcgttttaaagttgaacgtcaggtttatcagaaatttgagaccatgctgattgaaaaactgcattatctggtttttaaagatcgtgaagtttgtgaagaaggtggtgttctgcgtggttatcagctgacctatattccggaaagcctgaaaaaagttggtaaacagtgtggttttattttttatgttccggcaggttataccagcaaaattgatccgaccaccggttttgttaatctgtttagctttaaaaatctgaccaatcgtgaaagccgtcaggattttgttggtaaatttgatgaaattcgttatgaccgtgataagaagatgttcgagttcagcttcgattacaataattatattaagaaaggtaccattctggcaagcaccaaatggaaagtttataccaatggtacccgtctgaaacgtattgttgttaatggtaaatataccagccagagcatggaagttgaactgaccgatgcaatggaaaaaatgctgcagcgtgcaggtattgagtatcatgatggtaaagatctgaaaggtcaaattgttgagaaaggtattgaagcagaaatcattgatatttttcgtctgaccgttcagatgcgtaatagccgtagcgaaagcgaagatcgtgaatatgatcgtctgattagcccggttctgaatgataaaggtgaattttttgataccgcaaccgcagataaaaccctgccgcaggatgcagatgcaaatggtgcatattgtattgcactgaaaggtctgtatgaagttaaacagatcaaagaaaattggaaagaaaatgaacagtttccgcgtaataagctggttcaggataataagacctggtttgattttatgcagaaaaaacgttatctg

SEQ ID NO: 643 - DNA, 3915 bp, synthetic construct
  misc_feature 1..3915: note = Sequence codon optimized for E. coli expression
  source 1..3915: mol_type = other DNA
atgaataaagcagcagataattataccggtggtaattacgatgaatttattgcactgagcaaagttcagaaaaccctgcgtaatgaactgaaaccgaccccgtttaccgcagaacatattaaacagcgtggtattattagcgaagatgaatatcgtgcacagcagagcctggaactgaaaaaaattgcagatgaatattatcgtaactatattacccataagctgaatgatattaacaacctggatttttacaatctgtttgatgcaattgaagaaaagtataagaagaatgacaaggataatcgtgacaaactggatctggttgaaaaaagcaaacgtggtgaaattgcaaaaatgctgagcgcagatgataacttcaaaagcatgtttgaagcaaaactgattaccaaactgctgccggattatgttgaacgtaattatacaggtgaagataaagaaaaagcactggaaaccctggcactgtttaaaggttttaccacctattttaaaggttatttcaagacccgtaaaaatatgtttagcggtgaaggtggtgcaagcagcatttgtcatcgtattgttaacgtgaatgcaagcattttttatgataatctgaaaacctttatgcgtattcaggaaaaagcaggtgatgaaattgcactgattgaagaagaactgaccgaaaaactggatggttggcgtctggaacatattttttctcgtgattattacaacgaagttctggcacagaaaggtattgattattataaccagatttgtggtgatattaataagcacatgaatctgtattgtcagcagaataagtttaaggcaaacatttttaagatgatgaagctgcagaaacagattatgggtattagcgaaaaagttttcgaaattccgccgatgtatcagaatgatgaagaagtttatgcaagctttaacgaatttattagccgtctggaagaagttaaactgaccgatcgtctgcgtaacatcctgcagaatattaatatttacaataccgcaaagatttatatcaatgcccgttactataccaatgttagcacctatgtttatggtggttggggtgttattgaaagcgcaattgaacgttatctgtgtaataccattgcaggtaaaggtcagagcaaagttaagaagattgaaaacgcaaaaaaagacaataagtttatgagcgttaaagaactggatagcattgttgcagaatatgaaccggattattttaatgcaccgtatattgatgatgacgataatgcagttaaagtttttggtggtcagggtgttctgggttattttaataagatgagcgaactgctggcagatgttagcctgtataccattgattacaacagcgatgatagcctgattgaaaataaagaaagcgcactgcgtattaaaaagcagctggatgatattatgagcctgtatcattggctgcagacctttattattgatgaagttgttgaaaaagataatgcattctatgcagagctggaagatatttgttgtgagctggaaaatgttgttaccctgtatgatcgtattcgtaattatgttacccgtaaaccgtatagcacccagaaatttaaactgaattttgcaagcccgaccctggcaagcggttggagccgtagcaaagaatttgataataatgcaatcattctgctgcgcaacaataaatattacatcgccatttttaatgttaacaacaaaccggataaacagattattaaaggtagcgaagaacagcgtctgagcaccgactacaagaaaatggtttacaatttactgccgggtccgaataaaatgctgccgaaagtttttattaaaagcgataccggtaaacgtgattataatccgagcagctatattctggaaggttatgaaaaaaatcgtcatattaaaagcagcggtaattttgatatcaactattgtcatgacctgattgactattataaagcatgcattaataaacatccggaatggaaaaattatggttttaaattcaaagagaccaatcagtataacgatattggccagttttataaagatgttgaaaaacagggttatagcattagctgggcatatatttctgaagaagatattaacaaactggatgaagaaggtaagatttacctgttcgagatttataataaagatctgagcgcacatagcaccggtcgtgataatctgcataccatgtatctgaaaaatatttttagcgaggataatctgaagaacatttgtattgagctgaatggtgaagcagaactgttttatcgtaaaagcagcatgaaaagcaatattacacataagaaggataccattctggttaataaaacctatatcaatgaaaccggtgttcgtgttagcctgagcgatgaagattatatgaaggtgtacaactattacaacaacaattacgttattgataccgaaaacgacaaaaacctgattgatattatcgaaaaaattggtcatcgtaaatcaaagattgacatcgttaaagataaacgttataccgaagataaatattttctgtatctgccgattaccattaattatggtatcgaagatgagaatgtgaatagcaaaattattgagtacattgcaaaacaggataatatgaacgttattggtattgatcgtggtgaacgtaatctgatttatattagcgttattgataataaaggtaacatcatcgaacagaagagctttaacctggtgaataactacgattataagaataaactgaaaaatatggagaaaacccgtgataatgcacgtaaaaattggcaggaaattggtaaaattaaagatgtgaaaagcggttatctgagcggtgttattagcaaaattgcacgtatggttattgattacaatgcaattattgttatggaggatctgaataaaggttttaaacgtggtcgttttaaagttgaacgtcaggtttatcagaaattcgaaaatatgctgattagcaaactgaattatctggtttttaaagaacgtaaagcagatgaaaatggtggtattctgcgtggttatcagctgacctatattccgaaaagcattaaaaatgttggtaaacagtgtggttgtattttttatgttccggcagcatataccagcaaaattgatccggcaaccggctttattaatatttttgatttcaaaaaatatagcggtagcggtattaacgcaaaagttaaggataaaaaagaattcctgatgagcatgaatagcattcgttatattaatgaaggttctgaagaatatgaaaagatcggtcatcgtgaactgtttgcatttagctttgattataataattttaaaacctacaacgtgagcagcccggttaatgaatggaccgcatatacctatggtgaacgtattaaaaaactgtataaagatggtcgttggctgcgtagcgaagttctgaatctgaccgaaaatctgattaaactgatggaacagtataatattgaatataaagatggccatgatattcgtgaagatattagccatatggatgaaacccgtaatgcagattttatttgtagcctgtttgaagaactgaaatataccgttcagctgcgtaatagcaaaagcgaagcagaagatgaaaattatgatcgtctggttagcccgattctgaatagcagcaatggtttttatgatagcagcgattatatggaaaatgaaaataataccacccataccatgccgaaagatgcagatgcaaatggtgcatattgtattgcactgaaaggtctgtatgaaattaataaaattaagcagaactggagcgatgataagaagtttaaagaaaatgagctgtatattaatgttaccgaatggctggattatattcaaaatcgtcgttttgaa

SEQ ID NO: 644 - DNA, 3786 bp, synthetic construct
  misc_feature 1..3786: note = Sequence codon optimized for E. coli expression
  source 1..3786: mol_type = other DNA
atggcaaaaaataccatttttacccagtttaccggtctgtatccggttagcaaaaccctgcgttttgaactgaaaccgatgggtaaaaccctggaaaaaattaaagaaaccggtgttattgaaaatgataaaaagcgtcataacgattacttcgacgcaaaaaagattatcgataagtaccataagtattttattgatgccgcactgagcaaattttctcgtattgattggaatccgctgaaagaagcaattgaaggtagcctggatcgtagcgatgcaagcaaaaaaaagctggaaaaaacccagaccgaatttcgtaaaaaaattgccaaagcactgaccacccatgatcattacaaagaactgaccgcaagcaccccgaaagatctgtttctgaaagtttttccggatcattttggtaaacagccggcaattgatacctttgatggttttagcagctattttaccggttttcaggaaaatcgtcagaatatttatagcgatgaagcaattagcaccgcaattccgtatcgtctggttcatgacaactttccgaaatttctgagcaatattgaagtttataaaaccctgaaagataatgcaccgagcgttctgagcgatgcagaaaatgaactgaaagattttctgaacggtaaaccgctggcaaatatttttgaattaaatgcctataacgacgttctgacccagagcggtattgatttttttaatcaagttattggtggtattagcggtgaaggtggtgaaaaaaagacccgtggtattaatgaatttagtaatctgtatcgtcagcagcatccggaatttgcacagaaacgtctggcaaccaaaatgattccgctgtataaacagattctgagcgatcgtgaaaccaaaagctttattctggaaagctatagcaccgatagccaggttcaggaaagcgttaaagaattttttgaaagccagattctgaattgtgatattgcaggtcgtaaagttaatgttctgaatgaactgaccagcctgattaaacgtattgcagaatttgatctgggtagcatttatattaatcaggaagaactgagcaatatcagcctggaactgtttaaaagctggaataccatcaatgcagttctgtttaaaaatgcagaaaatcgcattggtagcgcagaaaaagcagcaaataagaagaaaattgatgcatggatgaaaagcaatgaatttagcattgcaaccctgaatctggcaattgcagaaagcgatagcgaagaaattagccgtgttaaaatcgaaagctattggaatgattttgaagcaaaagttcagagcattctgtgtggtgataatcgtcgtaatctggatgaatttctgagcgcaacctttaatgaaaataatgcactgcgtgaagatagcgaaattattggtaaactgaaagcatttctggatgcactgattgaaattatgcatagcattaaaccgctgattagcgatgcagagaatcgtgatctgagcttttataatgaactgatgccgctgtatgatcagctgagcctggttgttccgttatataataaaattcgtaattatgcaacccagaaactgaccgaaagcgaaaaatttaaactgaattttgataatccgaccctggcagatggttgggatcagaataaagaagatgcaaacaccgcaattttactgctgaaaaatggtctgtattatctgggtattatgaacgcaaagaataaaccgaaaattaaagattttaagaccagcgaaagcgaagattgttatgataaaatggtttataaactgctgccgggtccgaataaaatgctgccgaaagttttttttagcgaaaaaggtctggcaacctttaaaccgccgaaagatattctggatggttataatgcaggtaaacataaaaaaggtgatctgttcgatattggtttttgccaccagttaattgacttttttaaagaaagcattgcaaaacatccggattggaaaaaatttgactttaaatttagcgataccagcagctatgaagatattagcggtttctacaaagaagttaccgatcagggttataaaattacctttagcaaaattccgaccagccagattgacgaatgggtgaatgaaggtaagctgtttctgtttcagatttataataaagattttgcaccgggtgcaaaaggtagcccgaatctgcataccctgtattggaaaagcgtttttagcccggaaaatctgaaagatgttgttgttaaactgaatggtgaagcagaactgttttatcgtccgagcagcgttaaaaagccgtatagccataaagttggtgaaaaactggttaatcgtattggtaaagatggtctgccgctgccggaaagcgtttttggtgaactgtttcgttattttaatggtaaactggatggtgaactgagcgatgaagccaaacgttatctggatgttgcagttgttaaagatgttaaacatgaaattgttaaagatcgtcgttatacccaggataaatttgaatttcatgttccgctgaccctgaattttaaagcagatagcaaaaatgagtatatgaatgaacgtgttcgtcattttctgaaagataacccggatgttaatattattggtattgatcgtggtgaacgtcatctgctgtatatgaccctgattaatcagaaaggtgaaattctgaagcagaaaagctttaatattgttgaaagcgttaattaccaggcaaaactggttcagcgtgaaaaagaacgtgatgcagcacgtaaaagctggagcagcgttggtaagattaaagatctgaaagaaggttttctgagccaggttattcatgaaattaccaccaccatgattgagaataatgcaatcgttgtgctggaagatctgaattttggttttaaacgtggtcgtttttgtgttgaacgtcaggtttaccagaagtttgagaaaatgctgattgataaactgaattatctggtttttaagaacaaaccggaaggtgatgttggtggtgttctgaaaggttatcagctggcagaaaaatttgatagctttcagaaattaggtaaacagagcggttttctgttttatattccggcagcatacaccagcaaaattgatccgaccaccggttttgcaaatctgtttaatatgaccgaactgacctctgcagaaaaaaagaaagattttttgagccattttgatgatattacctatgatggtaaaaatgatcgttttctgtttggtttcgactacaagaactttaaatgttttcagaccgattttattaagaaatggaccgtttatacccagggtaaacgtattgtttatgataaagaaagcaaaagcgcaaaagaaatttttccggttgaaattattaaagcagcactggcaaaacagaatattgcactgaccgatcagctggatgttctgagcgccattaatagcgttgaagcaagcccgaagagcgcaagcttttttggtaatatttgttatgcatttgaaaaaaccctgcagatgcgtaatagcattccgaataccgatgaagattatttagttagcccggttatgaataaacgtggtgaattttatgatagccgtagctgtgatgatgcactgccgcagaatgcagatgcaaatggtgcatatcatattgcattaaaaggtctgtatctgattaaaaatgttttcgatgcaggtggtaaagatttaaagattagccatgaagattggtttaaatttgcacagtcacgtaattgt

SEQ ID NO: 645 - DNA, 3813 bp, synthetic construct
  misc_feature 1..3813: note = Sequence codon optimized for E. coli expression
  source 1..3813: mol_type = other DNA
atgaaaaatctggcaaattttaccaatctgtatagcctgcagaaaaccctgcgttttgaactgaaaccgattggtaaaaccctggattggattattaaaaaagatctgctgaaacaggatgaaattctggcagaagattataagatcgttaaaaagattatcgatcgctatcacaaggattttattgacctggcatttgaaagcgcatatctgcagaaaaaaagcagcgatagctttaccgcaattatggaagcaagcattcagagctatagcgaactgtattttattaaagagaaaagcgatcgtgataaaaaagcaatggaagaaattagcggtattatgcgtaaagaaattgttgaatgttttaccggtaaatatagcgaagttgttaaaaagaagttcggtaacctgtttaaaaaagaacttattaaggaagacctgctgaatttttgtgaaccggatgaactgccgattattcagaaatttgcagatttcaccacctattttaccggttttcatgaaaatcgtgaaaatatgtatagcaatgaagaaaaagcaaccgcaattgcaaatcgtctgattcgtgagaatctgccgcgttatctggataatctgcgtattattcgtagcattcagggtcgttataaagattttggttggaaagatctggaaagcaatctgaaacgtattgataaaaatctgcagtatagcgattttctgaccgaaaatggtttcgtttatacctttagccagaaaggtattgatcgttataatctgattctgggtggtcagagcgttgaaagcggtgaaaaaattcagggcctgaatgaattaattaatctgtatcgtcagaaaaatcaactggatcgtcgtcagctgccgaatctgaaagaactgtataaacagattctgagcgatcgtacccgtcatagctttgttccggaaaaatttagcagcgataaagcactgctgcgtagcctgctggattttcacaaagaagttatccagaataaaaatctgtttgaagaaaagcaggttagcctgctgcaggcaattcgtgaaaccctgaccgatctgaaaagctttgatctggatcgtatttatctgaccaatgataccagcctgacccagattagcaattttgtttttggtgattggagcaaagttaaaaccattctggcaatttattttgatgaaaatattgcaaatccgaaagatcgtcagcgtcagagcaatagctatctgaaagcaaaagaaaattggctgaaaaaaaactactatagcattcatgagctgaatgaagcaattagcgtttatggtaaacatagcgatgaagaactgccgaataccaaaattgaagattattttagcggtctgcagaccaaagatgaaaccaaaaaaccgattgatgttctggatgcaattgttagcaaatatgcagatctggaatctctgctgaccaaagaatatccggaagataagaacctgaaaagcgataaaggtagcattgaaaagatcaaaaattacctggacagcattaaacttctgcagaattttctgaaaccgctgaaaccgaaaaaagttcaggatgaaaaagatctgggtttttataacgatctggaactgtacctggaaagcctggaaagcgcaaatagcctgtataataaagttcgtaattatctgaccggtaaagagtatagcgatgagaaaattaaactgaatttcaagaacagcaccctgctggatggttgggatgaaaataaagaaaccagcaatctgagcgttatttttcgtgataccaataactattatctgggtattctggacaaacagaataatcgtatttttgaaagcattccggaaattcagagcggtgaagaaaccattcagaaaatggtttataaactgctgccgggtgcaaataatatgctgccgaaagttttttttagcgaaaaaggtctgctgaaatttaatccgagcgatgaaattaccagcctgtatagcgaaggtcgttttaaaaaaggtgacaaattcagcattaacagcctgcataccctgattgatttttataaaaaaagcctggcagttcatgaagattggagcgtttttaattttaaatttgatgagaccagccattatgaagatattagccagttttatcgtcaggttgaaagccagggttacaaaattaccttcaaaccgattagcaaaaaatatattgataccctggttgaagatggtaagctgtatctgtttcagatttataataaagattttagccagaataagaaaggtggtggtaaaccgaatctgcataccatttattttaaaagcctgtttgagaaggagaatcttaaagatgttattgttaaactgaatggtcaggcagaagttttttttcgtaaaaaaagcattcattacgacgaaaatattacccgttatggtcatcatagcgaactgctgaaaggtcgtttttcatatccgattctgaaagataaacgttttaccgaagataaattccagtttcactttccgattaccttaaattttaaaagcggcgaaattaaacagtttaatgcacgtgttaacagctatcttaaacacaacaaagacgttaaaattattggtatcgatcgtggtgaacgtcacctgctgtatctgagcctgattgatcaggatggtaaaattctgcgtcaggaaagcctgaacctgattaaaaatgatcagaatttcaaggccattaattatcaggaaaagctgcataaaaaagaaattgaacgtgatcaggcacgtaaaagctggggttctattgaaaatattaaagaactgaaagaaggttatctgagccaggttgttcataccattagcaaactgatggtggaacataacgcaattgttgttctggaagatctgaattttggttttaaacgtggtcgtcagaaagttgaacgtcaggtttatcagaaatttgaaaagatgctcattgagaagctgaattttctggtttttaaagataaagaaatggatgaaccgggtggtattctgaaagcatatcagctgaccgataattttgttagctttgaaaaaatgggtaaacagaccggttttgttttttatgttccggcatggaataccagcaaaattgatccgaaaacaggttttgttaactttctgcatctgaattatgaaaatgttaatcaggcaaaagaactgattggtaaatttgatcagattcgttataatcaggatcgtgattggttcgaatttcaggttaccaccgatcagttttttaccaaagaaaatgcaccggatacccgtacctggattatttgtagcaccccgaccaaacgtttttatagcaaacgtaccgttaatggtagcgttagcaccattgagattgacgttaatcagaaactgaaagaattatttaatgactgtaactatcaggatggtgaagatctggttgatcgtattctggaaaaagatagcaaagattttttttccaaactgatcgcatacctgcgtattctgaccagcctgcgtcagaataatggtgaacagggttttgaagaacgtgattttattctgagcccggttgttggtagcgatggtaaattttttaatagcctggatgcaagcagccaggaaccgaaagatgcagatgcaaatggtgcatatcatattgccctgaaaggtctgatgaatctgcatgttattaatgaaaccgatgatgaaagcctgggtaaaccgagctggaaaattagcaataaagattggctgaattttgtttggcagcgtccgagcctgaaagca

SEQ ID NO: 646 - DNA, 3735 bp, synthetic construct
  misc_feature 1..3735: note = Sequence codon optimized for E. coli expression
  source 1..3735: mol_type = other DNA
atggaaacctttagcggttttaccaatctgtatccgctgagcaaaaccctgcgtttccgtctgattccggttggtgaaaccctgaaacattttattggtagcggtattctggaagaagatcagcatcgtgcagaaagctatgttaaagtgaaggcaattattgatgattaccatcgtacctatattgaaaatagcctgagcggttttgaactgccgctggaaagcaccggtaagtttaacagcctggaagaatattatctgtatcataatattcgtaataaaaccgaggagattcagaacctgagcagcaaagttcgtaccaatctgcgtaaacaggttgttacccagctgaccaaaaatgaaatttttaagcgtattgacaaaaaagagctgattcagagcgatctgattgattttgttaaaaatgaaccggatgcaaatgagaaaattgcactgattagcgaatttcgtaattttaccgtttattttaaaggctttcatgaaaatcgtcgtaatatgtatagcgatgaagaaaaaagcaccagcattgcctttcgtctgattcatgaaaatttaccgaagtttattgataatatggaagttttcgccaaaattcagaataccagcattagcgaaaattttgatgcaattcagaaagaactgtgtccggaactggttaccctgtgtgaaatgtttaaactgggttattttaataaaaccctgagccagaaacagattgatgcatataataccgttattggtggtaaaaccaccagcgaaggcaaaaagattaagggtctgaatgaatatattaatctgtataatcagcagcataaacaggaaaaactgccgaaaatgaaactgctgtttaaacagattctgagcgatcgtgaaagcgcaagctggctgctggaaaaatttgaaaatgatagccaggttgttggtgcaatggttaatttttggaataccattcatgataccgttctggcagaaggtggtctgaaaaccattattgcaagcctgggtagctatggtctggaaggtatttttctgaaaaatgatctgcagctgaccgatattagccagaaagcaaccggtagctggagcaaaattagcagcgaaattaaacagaaaattgaagcaatgaatccgcagaaaaagaaagaaagctatgaaagctatcaggaacgtattgataagctgtttaaaagctataaaagctttagcctggcatttgttaatgaatgtctgcgtggtgaatataaaattgaagattattttctgaaactgggtgcagttaacagcagcctgctgcagaaagaaaatcattttagccatatcctgaatacctataccgatgttaaagaagttattggtttttatagcgaaagcaccgataccaaactgattcaggataatgatagcattcagaagatcaaacagtttctggatgcagttaaagatctgcaggcatatgttaaaccgctgctgggtaatagcgatgaaaccggtaaagatgaacgtttttatggtgacctgattgaatattggagcctgctggatctgattaccccgctgtataatatggttcgtaattatgtgacccagaaaccgtacagcgttgataaaattaaaattaattttcagaatccgaccctgctgaatggttgggatctgaataaagaaatggataataccagcgttattctgcgtcgtgatggtaaatattacctggcaattatgaataataaaagccgtaaagtgtttctgaaatatccgagcggtaccgatcgtaattgttatgaaaaaatggaatataaactgctgccgggtgcaaataagatgctgccgaaagttttttttagcaaaagccgtattaatgaatttatgccgaatgaacgtctgctgagcaattatgaaaaaggtacccataaaaaaagcggtacctgttttagcctggatgattgtcataccctgatcgatttttttaaaaaatcactgaataaacacgaggattggaaaaactttggttttaaatttagcgataccagcacctatgaagatatgagcggtttttataaagaagttgagaatcagggctataaactgagctttaaaccgattgatgcaacctatgttgaccagctggttgatgaaggtaaaatttttctgttccagatttataataaagacttcagcgaacatagcaaaggtaccccgaatatgcataccctgtattggaaaatgctgtttgatgaaaccaatctgggtgatgttgtttataaactgaatggtgaagcagaagttttttttcgtaaagcaagcattaatgttagccatccgacccatccggcaaatattccgattaaaaaaaagaacctgaaacataaagatgaggaacgtattctgaaatatgacctgattaaagataaacgttataccgttgatcagtttcagtttcatgttccgattaccatgaattttaaggcaaatggtaatggcaatattaatcagaaagcaattgattatctgcgtagcgcaagcgatacccatattatcggtattgatcgtggtgaacgtaatctgctgtatctggttgttattgatggtaatggtaagatttgtgagcagtttagcctgaatgaaattgaagttgaatataacggtgagaaatacagcaccaattatcatgatctgctgaatgttaaagaaaatgaacgtaaacaggcacgtcagagctggcagagcattgcaaatattaaagatctgaaagaaggttatctgagccaggttattcataaaattagcgaactgatggttaaatataatgccattgttgttctggaagatctgaatgcaggttttatgcgtggtcgtcagaaagttgaaaaacaggtttatcagaaattcgaaaaaaagctgattgagaagctgaattatctggtttttaaaaaacagagcagcgatctgccgggtggtctgatgcatgcatatcagctggcaaataaatttgaaagctttaataccctgggtaaacagagcggttttctgttttatattccggcatggaataccagcaaaatggatccggttaccggttttgttaatctgtttgatgttaaatatgaaagcgttgacaaagcaaagagctttttttctaaatttgatagcattcgttataatgttgagcgtgatatgtttgaatggaaatttaactacgatgaatttaccaaaaaagcagaaggtaccaaaaccgattggaccgtttgtagctatggtaatcgtattattacctttcgtaatccggataaaaatagccagtgggataataaggagattaatctgaccgaaaatattaaactgttatttgaacgttttggtattgatctgagcagcaatctgaaagatgaaattatggaacgtaccgaaaaagagtttttcattgaactgattagcctgtttaaacttgttctgcagatgcgtaatagctggaccggtaccgatattgattatttagttagcccggtttgtaatgaaaatggtgaattttttgatagccgtaatgttgatgaaaccctgccgcagaatgcagatgcaaatggtgcatataatattgcacgtaaaggtatgattctgctggataaaatcaagaaaaataatggtgagaaaaagctgaccctgagcattaccaatcgtgaatggctgagctttgcacagggttgttgtaaaaatggt

SEQ ID NO: 647 - DNA, 3735 bp, synthetic construct
  misc_feature 1..3735: note = Sequence codon optimized for E. coli expression
  source 1..3735: mol_type = other DNA
atgcaggaacacaaaaagattagccatctgacccatcgtaatagcgttcagaaaaccattcgtatgcagctgaatccggttggtaaaacaatggattattttcaggcaaaacagattctggaaaatgatgaaaagctgaaagaaaattaccagaaaattaaagagattgcagaccgtttttatcgtaatctgaatgaagatgttctgagcaaaacccgtctggataaactgaaagattataccgatatttattatcattgtaacaccgatgcagatcgtaaacgtctggatgaatgtgcaagcgaactgcgtaaagaaattgttaagaatttcaagaatcgtgatgaatacaacaagctgtttaataagaagatgatcgagattgttctgccgaaacatctgaaaaatgaagatgagaaagaagtggttaccagctttaaaaactttaccacctattttaccggtttttttacaaaccgtaaaaatatgtatagcgatggtgaagaaagcaccgcaattgcatatcgttgtattaatgaaaatctgccgaagcatctggataatgttaaagcatttgaaaaggcaattagcaaactgagcaaaaatgcaattgatgatctggataccacctatagcggtctgtgtggcaccaatctgtatgatgtttttaccgttgattattttaatttcctgctgccgcagagcggtattaccgaatataataaaattattggcggttataccaccaatgatggtaccaaagtgaaaggtattaatgagtacattaatctgtataatcagcaggttagcaaacgtgataagattccgaatctgaaaattctgtataaacagattttaagcgaaagcgaaaaagttagcttcattccgccgaaatttgaagatgataatgaactgctgagcgcagttagcgaattttatgcaaatgatgaaacctttgatggtatgccgctgaaaaaagcaattgacgaaaccaaactgctgtttggtaatctggataatccgagcctgaatggtatttacattcagaatgatcgtagcgttaccaatctgagcaatagcatgtttggtagctggagcgttattgaggatctgtggaataaaaactatgatagcgtgaatagcaatagccgtattaaagatattcagaaacgtgaagataaacgtaaaaaggcatataaagcagaaaaaaaactgagcctgagctttctgcaggttctgattagcaatagcgaaaatgatgagattcgtgaaaaaagcattgttgattattataagaccagcctgatgcagctgaccgataatctgagcgataaatataatgaagcagcaccgctgctgaatgaaaattacagcaatgaaaaaggcctgaaaaatgatgataaaagcattagcctgattaaaaacttcctggatgcaattaaggaaattgaaaagttcatcaaaccgctgagcgaaaccaatattaccggtgaaaaaaatgatctgttttatagccagtttacaccgctgctggataatattagccgtattgatattctgtatgataaagttcgtaactacgttacccagaaaccgtttagcaccgataaaattaaactgaattttggtaatagccagctgctgaatggttgggatcgtaataaagaaaaagattgtggtgcagtttggctgtgtaaagatgaaaagtactatctggcaattattgacaagagcaataattccattctggaaaacattgattttcaggattgtgatgaaagcgattgttatgagaaaattatttataagctgctgccgggtccgaataaaatgctgccgaaagtttttttcagcgaaaaatgtaaaaaactgctgagcccgagcgatgaaattctgaaaatttataaaagcggtacctttaaaaccggtgataaatttagcctggatgattgtcataaactgattgatttttataaagagagctttaagaagtacccgaattggctgatttataatttcaaattcaagaaaaccaacgaatacaatgacattcgtgaattttataatgatgtggcactgcagggttataatattagcaaaatgaaaattccgaccagctttattgataaactggttgatgaaggtaagatttacctgtttcagctgtataataaagattttagcccgcatagcaaaggtaccccgaatctgcataccctgtattttaaaatgctgtttgatgaacgtaatctggaagatgttgtttatcgtctgaatggtgaagcagaaatgttttatcgtccggcaagcattaaatatgataaaccgacccatccgaaaaataccccgattaaaaataaaaataccctgaacgataaaaagaccagcacctttccgtatgacctgattaaagataaacgttacaccaaatggcagtttagcctgcattttccgattaccatgaattttaaagcaccggataaagcaatgattaatgatgacgttcgtaatctgctgaaaagctgtaataataattttatcattggtattgatcgtggtgaacgtaatttgctgtatgttagcgttattgatagcaatggtgcaattatctaccagcatagcctgaatattattggtaataaattcaaagagaagacctatgaaaccaattaccgtgaaaaactggcaacccgtgaaaaagaacgtaccgaacagcgtcgtaactggaaagccatcgaaagcattaaagaactgaaagaaggttatattagccaggcagttcatgttatttgtcagctggttgttaaatatgatgcaatcattgttatggaaaaactgaccgatggttttaaacgtggtcgtaccaaatttgaaaagcaggtttatcagaaatttgagaaaatgctgattgataaacttaattactacgtggataagaaactggatccggatgaagaaggtggtctgctgcatgcatatcagctgaccaataaactggaaagctttgataaattaggtatgcagagcggttttattttttatgttcgtccggattttaccagcaaaattgatccggttaccggttttgttaatctgctgtatccgcagtatgaaaatattgacaaagcaaaagatatgattagccgttttgatgaaattcgttataatgcaggtgaagattttttcgaatttgatatcgattatgatgaatttccgaaaaccgcaagcgattatcgtaaaaaatggaccatttgtaccaatggtgaacgtattgaagcatttcgtaatccggcaaataataatgaatggagctatcgtaccattattctggcagaaaagtttaaagagctgtttgataacaacagcattaattatcgtgatagcgatgatctgaaagcagaaattctgagccagaccaaaggtaaattctttgaagactttttcaagctgctgcgtctgaccctgcagatgcgtaatagcaatccggaaaccggtgaagatcgtattctgagcccggttaaagataagaatggtaatttctacgatagcagcaaatatgatgaaaaaagtaaactgccgtgtgatgcagatgcaaatggtgcatataatattgcacgtaaaggtctgtggattgttgaacagtttaaaaaagcagataatgttagcaccgttgaaccggttattcataacgatcagtggctgaaatttgttcaggaaaatgatatggcaaataat

SEQ ID NO: 648 - DNA, 3900 bp, synthetic construct
  misc_feature 1..3900: note = Sequence codon optimized for E. coli expression
  source 1..3900: mol_type = other DNA
atgaactttcagccgtttttccagaaatttgttcatctgtatccgattagcaaaaccctgcgttttgaactgattccgcagggtgcaacccagaaatttattagcgaaaaacaggttctgctgcaggatgaaattcgtgcacgtaaatatccggaaatgaaacaggcaattgatggttatcataaagattttattcagcgtgcactgagcaatattgatagccaggtttttgaacaggcactgaatacctttgaagatctgtttctgcgtagccaggcagaacgtgcaaccgatgcatataagaaagatttcgaaaccgcacagaccaaactgcgtgaactgattgttcatagctttgaaaaaggtgaatttaagcaggaatataagagcctgtttgataaaaatctgattaccaatctgctgaaaccgtgggttgaacagcagaatcagattggtgatagcaactatacctatcatgaagattttaacaaatttaccacctattttctgggttttcatgaaaatcgcaagaatatttatagcaaagatccgcataaaaccgcactggcatatcgtctgattcatgaaaatttaccgaagttcctggaaaataacaagattctgctgaaaattcaaaatgatcatccgagcctgtgggaacagctgcagaccctgaatcagaccatgccgcagctgtttgatggttgggattttagccagctgatgcaggttagcttttttagcaataccctgacccagaccggtattgatcagtataataccattattggtggtattagcgaaggtgaaaatcgtcagaaaattcagggtattaatgagctgattaacctgtataatcagaaacaggataaaaaaaatcgtgttgcaaaactgaagcagctgtataaacagattctgagcgatcgtagcaccctgagctttctgccggaaaaatttgttgatgataccgaactgtatcatgcaattaatatgttttacctggaacatctgcatcatcagagcatgattaatggtcatagctataccctgctggaacgtgttcagctgctgattaatgaactggcaaattatgatctgagcaaagtttatctggcaccgaatcagctgagcaccgttagccatcagatgtttggtgattttggttatatcggtcgtgccctgaattattattatatgcaggttattcagccggattatgaacagctgctggcaagcgcaaaaaccaccaaaaaaattgaagcaaccgaaaagctgaaaacaattttcctggataccccgcagagcctggttgttattcaggcagcaattgatgaatatattcagctgcagccgagcaccaaaccgcatacccagctgaccgattttattattagcctgctgaaacagtatgaaaccgttgcagatgatcagagcattaaagttattaatgtttttagcgatattgagggtaagtatagctgtatcaaaggtctggttaataccaaaagcgaaagcaaacgtgaagttttacaggatgaaaaactggcaaccgatattaaggccttcatggatgcagtgaataatgttattaaactgctgaagccgtttagcctgaatgaaaagctggttgcaagcgttgaaaaagatgcacgtttttatagcgattttgaagaaatttatcagtctctgctgatttttgttccgctgtataataaagttcgtaattatattacccagaaaccgtatagcaccgaaaaatttaaactgaatttcaataagccgaccctgctgagcggttgggatgcaaataaagaagcagataatctgagcattctgctgcgtaaaaatggtaattattacctggcaattatggataccgcaaaaggtgcaaacaaagcatttgaaccgaagaccttaaatcagctgaaagttgatgatacaaccgattgttatgaaaagatggtttataaactgctgtcaggtccgagcaaaatgtttccgaaagcatttaaagcaaaaaataacgagggtaattattatccgaccccggaactgctgaccagctataataataacgaacacctgaaaaatgataaaaactttaccctggcaagcctgcatgcatatattgattggtgtaaagagtatattaatcgtaacccgagctggcatcagtttaattttaaatttagcccgacccagagctttcaggatattagccagttttatagcgaagttagcagccagagctataaagttcattttcagaccattccgagcgattatattgatcagctggttgcagaaggtaaactgtatctgtttcagatttataataaagatttcagcccgaatgcaaaaggtaaggaaaatctgcataccctgtattttaaagcactgtttagcgatgaaaatttaaaacagccggtttttaaactgagcggtgaagcagaaatgttttatcgtccggcaagcttacagctggcaaataccaccattcataaagcaggtgaaccgatggcagcaaaaaatccgctgaccccgaatgcaacccgtaccctggcatatgatattattaaagatcgtcgttttaccaccgataaatatctgctgcatgttccgattagcctgaattttcatgcacaggaaagcatgagcattaagaaacataatgatctggttcgtcagatgattaaacataatcatcaggatctgcatgttattggtattgatcgtggtgaaaaacatctgctgtatgttagcgttattgatctgaaaggtaatattgtttaccaggaaagcctgaatagcattaagagcgaagcacagaattttgaaaccccgtatcatcagctgctgcagcatcgtgaagaaggtcgtgcacaggcacgtaccgcatggggtaaaatcgaaaatattaaagaactgaaagatggttacctgagccaggttgttcatcgtattcagcagctgattctgaaatacaatgcaattgttatgctggaagacctgaattttggttttaaacgtggtcgttttaaaatcgagaaacagatttatcagaaatttgaaaaggccctgattcataaactgaattatgttgttgataaaagcacccaggcagatgaactgggtggtgttcgtaaagcatatcagctgaccgcaccgtttgaaagctttgaaaagctgggtaaacagagcggtgttctgttttatgttccggcatggaataccagcaaaattgatccggttaccggttttgttgatctgttaaaaccgaaatatgaaaatctggataaagcacaggcattttttaatgcatttgacagcattcattacaatgcacagaaaaactactttgagttcaaagtgaatctgaaacaatttgcaggtctgaaagcacaggccgcacaggcagaatggaccatttgtagctatggtgatgaacgtcatgtttatcagaaaaaaaatgcacagcagggtgaaaccgttattgttaacgtgaccgaagaattaaaagttctgtttgcaaaaaataatattgaagttgcccagagcgttgaactgaaagaaaccatttgtacccagacccaggttgatttttttaaacgtctgatgtggctgctgcaggttctgttagcactgcgttatagcagcagcaaagataaactggattatattctgagcccggttgcaaatgcacagggtgaattttttgatagccgtcatgcaagcgttcagctgccgcaggatagcgatgcaaatggtgcatatcatattgcactgaaaggtctgtgggttattgaacagctgaaagcagcagataatttagataaggttaaactggcaattagcaatgatgattggctgcattttgcacagcagaaaccttatctggca

SEQ ID NO: 649 - DNA, 3966 bp, synthetic construct
  misc_feature 1..3966: note = Sequence codon optimized for E. coli expression
  source 1..3966: mol_type = other DNA
atgaccggtatttttaaagactttacccatctgtatgaactgcagaaaaccctgcgttttgaactgattccggttggtcgtaccaaagaactgctggaaaaaaatcatgtttttgaaaaagatgagaaaattgccgaaaactacaaggatgttaagaagtacttcgatcgtctgcataaagaatttattaaagatgcatttagccataccaatctgccggagaatctgctggaaggttatgaacaaaaatattttagccataaactgaatccgagccgtgcaagccgtattgatctggaaaagattgcaaaacgtctgcgtaccattctgctgaaaagctttaataccgaagcagatcagtggaagaatcgttatctgaagaatatcgaacagaccctgaagaacaaaaacgagaaacagcagaaaaaagaactggaaaaaaaactgaaaaaaattaaggaaggtaccaaaggtatcgaactgttttttaaagttgaggttttcgatttcctgaaatataaatatccggaagcacagattaatggtaagagcatttttgacccgtttaataaatttggttgctattttaaaaagtttcacgaaacccgtatcaatttttataaagatgatggtaccagcaccgcaattccgacccgtatcattaacgacaatctgagcatttttctggaaaataagaaaattttcgaaagcaagtacagcaaaaaacataaaagcgtttttgcaaaaaatgaactgcgtatttttgttctgttttatttcaacaactgtttcagccagaaacagattgatggttacaataataccattgcactgattaatagcaatgttaatcagctgcgtcagaataatccggaagttagcaaaaaagatctgccgttttttaaacgtctgtttaaacaaattctgagccagccgagcaaacaggaaattgaacaggatagctttattgaaatttttcaggatgaagatgtgtttccgaccatgcagaaattcatcaatgaaaacaaaatctgtattccgaaagcaaagagcattttcaaaaaatttatcagcagccagaaagttaaaagcgatgaatataatattagccagatttatgttgcaaaacgctttattaacaccattagcaataaatggtttagcaattggaataccattcgtaatctgctgattccgaaagataaaaaaaacattccggattttatcagcgttaccagcctgaaagcagcattacagaaaacccagaatattgttgaggttaatgacctgtttcgtaaagaatatcgtgatattctggaagaaggtagcgacttctatcagattttcctgaaaatttgggaaaaggaatttgaaaaagcaaccgatatttatctgaatgaaaccaaagaaattgaaaaaatgatcaccgaagataagaaatacctgccgaataaaaaaggtcgtctgaaaagcggtaaaaaaggtagcattcagaaagaaaaatttctggattatacccagagcgtgtttgacatctacctgatgatgaaatatttttctctggaaaaaggtaaagaacgtgtttggaatccggaagcattagatgaagatgcaattggtggtttttacgagaagtttaaagagtattatgaaaatatcaacacctggaagtatttcaacgtttttcgtaattacctgaccaaaaaaccgtataacagcgaaaaaatcaagctgaattttgaatgtagcagcctgctgagcggttggagcaaaaattatgatagctatggtgcactgatttttgaaaaaaatgagaagtactatctgggtatcattaatggtaccaaattcaccaaagacgaaattgaacaactgtatctggatattcgtaacaacaatattagcctgcgtctggtttacaactaccagaaaccggatttcaaaaactttccgaaactgtttattcgtagcagcggtagcaattttgcaccggcagtgaaaaaatataacctgccgattgatagcgttctgaatatttatgataaaggtctgtttaaaaccagcaacaaaagcagccagaattatcatgaaagcctgaaaaagattattgattactttaagctgggtattagccagcatgaaagctataaaggttttagcttcaaatggcaggaaaccagcgaatatgataatattagcgatttctataaagatgcaacccgtagctgttataaagtgacctgggaaaacattaactttagcaaactgtatgaattaattgaaagcggtcgtctgtatctgtttcagatttataataaagattttgaactggacgagaatattgcaccgaaaggttataatttcaaagataaaaatggtcgtcgcaatctgcatagcatttattggaaagcactgtttagcaatacgaactttaaaaagaccattctgaaactgaatggtggtgcagaactgttttatcgtaaactgaccaaaaatctgaccaaagatccgattattaccgttaaaaaccagattaagattatcaagaagaacaacaacatttttcacaagaaacgttttacccagaataaaatctactttcattgtccggttagcattaattttaccgaaaatgactggaaaattaacaccaaaatttgtaacacgattcgtaataacagcaaagtgaaaattattggtattgatcgtggtgaaaaaaatctggcatattatagcgttattgatcatcagggtaatattctggaaaccgatagctttaatgaagttcaggaacgtgaagatcgtgagccgaccgattatcagaaaaaactggatcagattcaaaaagaacgtgattggcagcgtaaaagctggcaggagattagcagcattaaagaaatgaaaaaaggttatattagccaggttgttcatcagatttgtaagctgattcgtaaatatgaggcaattgttgttttcgaagatctgaatattggttttaaacgtggtcgttttgccattgaaaaacagatttatcagaatctggaactggcactggccaaaaaactgaattatatggtttttaaagatgcaaaagaagaagaaaccggtcattttctgcaggcatatcagctgaccccgccggttattaattttcaggatatcggtaaacagtgtggtattattttttatgtgccggcaagctataccagcgcaatttgtccggcatgtggttttcgtaaaaacattagcacctttgttgagaagattgagaaaaacatcgacctgattaataagtttaatatcgtttatgatccggataaagatcgcttttgttttcgttataaacgtagcgattttattaagagcgaaaaagaaaaagaagacgacagcaaagttaaactgtatagcaataccaaactgccggatgactttaccttttatagcaatgttgaacgttttaaatatattcgtgatcagaataatcgtggtggtaaagttgaactgaaatatccgaatgatagcttaaaaaagctgtttcatgaaaatggtatcaattttcagaactttagcaatatcagccagctgattaaaacccgtaattttgagaacgagaacttttacaagccgtttatttacattattagcctgattctgcagctgcgtaacaccaccattgaaatcaaccagaatgaaaataatgaaaaatatcgtgatttcatcagctgtccgcattgttatttccatagcgaaaataatctgattaccctgaccaaacgttataaaggtaaaaaaccgtttgaatttaatggtgatgcaaatggtgcatataacattgcccgcaaaggtattctgattctgcaaaaaattaataaagcaaaacgtcttgaagaaatcgaatatggtggtctgaccgttacccagcaggaatatgataaatatctggcactggttagcagcaaaaaagca

SEQ ID NO: 650 - DNA, 3732 bp, synthetic construct
  misc_feature 1..3732: note = Sequence codon optimized for E. coli expression
  source 1..3732: mol_type = other DNA
atgctgtttgaagcaggtgtttttcgtctgctgaaagaacgttttaaaaatgaaaaggacaccaccgttgatggtaataatatttttgatgaatggacccgttggaccggttactttaaaaaattctttgaaacccgtaaaaacttttataagagcgatgataccagcaccgcaattgcatatcgtgttattaatcagaatctgcgtcgtttttgtgaaaacatccagatttttgagaaaatcagcgaaaaaattgaatttagcgaagttgaaaagagctttgatattagctgtgcaggtatttttagcctggcatattataatgcatgtctgctgcagggtggtattgatacctataataaaattattggtggtgaagttgatgaaaaggataaaaagattccgggtattaatgaactgattaataagtatcgtcaggataatagcggtgaaaaaattccgtttctgaaacagctggataaacagattcatagcgcaaaagaagcatttattgaaagcattgaaaccaataaagaactggttggtaaactgaaaaccttttatgaaaatgcagaagttaagattcagagctttcgtaatctgattgcagatattgtgaccgattatagcggttatgatatcgacaaaatttatctgaccaaagaagcagttagccataatgcaagccgttggtttgcaagctttgaaagctttgaacgtgatctgtttgcagttgttgcagaaaaacagaataaactggtttatgagctgctgcgtacccataaaaatgatagcaaaattagcgataaagacggcaaattcagctttccggattttattaaatgtagccatattaaacgtgcactggaaaaacaggaaggtcgtatttggaaaggtgaatattatgaagatattgttgatttcgagaagattaaggacgtttttacccagtttctgtgtgtttttaaatttgaactggaacaacagttttttcgtaaaaccaccagcgcacagaccggtgaacagaccaaaattggttatgaaatttttgttaccaaaattaatgagctgattacccgtgaaaatccggttattgatctggaagaaaaaattgcaattaagaattttgcagacgcaaccctgctgatttatcagattgccaaatattttgcagttgaaaaacgtcgtggttggctggataattatgatctggatgatcgtttttataaaagcagcgatattggttatctgaatttttatcgtgatgcatttgaacagattgttcgtccgtataatctgtttcgtaattacctgaccaaaaaaccgtataataccaataaatgggttctgagctttgaaaatccgaccctggcagatggttgggataaaaataaagaaaaaaccaatgcagcagttattctgcgtaaagatggtcgctattatctgggtattattaaagaagattgtaaaagcctgtttgcagatcgttatagcaaagaaatgagcgaaggtattgaaagcggtagctttcagaaaatggcatataaattttttccggaagcaagcaaaatgattccgaaatgtagcacccagaccaaaaatgttaaagaacattttcgcaaaagcagcagcgattataatctgttccatgaaaaagattataaaatcagcgttgccatcaccaaaaatatttatgagctgaataatgtgttctaccgtaaagacaatattgaagagagctttgttccgaaaaatgattttgagaaaaagctgggtgttaaaaaatttcagcgtcagtatctggaaattagccgtgataataatggttataaacaggcactggcacagtggattgaattctgtatccgtttcctgaaagcatataaaagcaccaccatttttgattatagccgtctgcgtgaagcaaaagaatatgaaagcctggatgcattttatcaggatattaatgcactgacctataatattagctttgttcccattagcgaacagtatattaaagaaaagaacgacaatggtgaactgtttctgtttgaaatttataataaagattggagcctgggtccgatggataaaaatcgtaaacgtaccaaaaatctgcataccctgtattttgaacagctgtttagcaaagaaaatgaacaggaaaacttcctgtttcagctgaatggtgaagcagaactgttttttcgtccgaaaaccgaagaaaaacgtctgggttataaagtttgggatgcaggtgaaaaaaaatgggtgaaagcaaaagaaaaagaagatggtgcagttattgatcgtaaacgttatgcaaaagatattatcctgtttcattgtccgattaccctgaatcgtgttagcgaaagcaaaaccaaacgtgaaatggatgttgaaattcgtgaagttctgagcagcaccccgggtgttcatattattggtgttgatcgtggtgaaaaacatctggcatattacagcgttatcgatcagaatggtaaaattattgaaaccgataccctgaatagcattggcaaagatggtcgtggtaaaccggttgaatatgcaagcaaactggaaaaacgtgcacaggaacgtgaagcaagccgtcgtgattgggaagaagttgaagcaattaaagacctgaaaaaaggttatattagccaggttattcgtaatctggcagatctgattatcaaacacaacgcaattattgtttttgaagatctgaatatgcgttttaaacagattcgtggtggtattgaaaaaagcgcatatcagcagctggaacgtgcactgattgataaactgagctttctggttaaaaaaggtgaagaagatccgaaacagaccggtcatattctgcgtgcatatcagctggcagcaccggttattgcatttaaagacatgggtaaacagacaggtctgattttttatacccaggcaggttataccagcaaaacctgtccggaatgtggttatcgtcgtaatattaagtgtctgtttgaaaatattgaacaggcaaaaaccctgattgagaatctggaaagcattaattataacaagaaagaggatgtttttcagattagctatagcctggaaaaactgagcagcaaagatcagaaaaaagaaaaaaaagtgagcaatgaactgtatgccaaaaccctgaagaaagatatttttattctgaccaccaaaaatgcactgcgttataaatggtatgatcgttattctgaaaaagcaaaagttgcaaaacgtggtattgatgaatataaaggtgaagttaatgaaagcgaaaccaaaaaaggtgttgttaaagagttcaatctgaccgagtatctgaaaggtctgctgaaaacctatgaaattgattatgaacatggtggtattcgtgaacagattctgagcgttgcacgtggtcgtgaattctataaggactttctgtatgcactgtttttactgaccgaaacccgtcatagcattagcggtcgtaataccgattatattcagtgtcctgaatgtgaatttgatagccgtaaaggttttaaggatattaaagagtttaatggtgatgcaaatggtgcatataatattgcacgtaaaggtattatgatcctggaaaagatcaagcagtttaaaaaagataatgatggcaacctggaaaaaatgggttggggtgatctgagcattagcattgaagaatgggataaatttacccagaaagaa

SEQ ID NO: 651 - DNA, 3825 bp, synthetic construct
  misc_feature 1..3825: note = Sequence codon optimized for E. coli expression
  source 1..3825: mol_type = other DNA
atgggaaaaaaccaaaactttcaagagttcatcggcgtttcccctctgcagaaaactcttagaaacgaattgatacccacggaaaccaccaaaaagaatattacacaattggatttgttaacggaggatgaaatacgagcacagaaccgggaaaagctgaaagagatgatggacgattattatcgtgatgttatcgactcaacgttacatgcggggattgcagtggattggagttacttattttcttgcatgcggaaccacctgcgggagaatagcaaggaatccaaacgtgaacttgaacgtacccaagatagcattcgatctcagatctataataagttcgccgaacgcgcggattttaaagatatgtttggcgcctctataataacaaaattattacccacctacatcaaacagaatccggaatattcggagcgatatgatgaatcaatggaaatcctgaagttatatgggaaatttacaacttcactcacagactattttgaaacccgtaagaatatcttttccaaagaaaagataagctcagctgtaggctaccggatagtggaggaaaatgcggaaatatttcttcagaatcagaacgcgtatgatcgcatttgcaagatcgccggcctggacctgcatggtctcgacaatgaaatcactgcgtacgtggacggtaaaaccctgaaggaagtatgtagtgatgaaggtttcgctaaggcaatcacacaagaggggatagaccgttataacgaagctattggggctgtaaatcagtatatgaacttactttgtcaaaagaacaaagcgctcaaaccaggtcagtttaaaatgaaacgtctgcataaacaaatcttgtgtaaaggcacaacatcgtttgacataccgaagaaatttgagaatgataaacaagtttatgatgccgttaactcctttacggaaattgtcatgaaaaacaatgatttgaaacgcctgctgaatataacacagaacgttaatgattatgatatgaacaaaatatatgtggctgcagatgcctactccacaatcagtcagttcatctcgaagaaatggaacttgatagaagaatgcctgctggattattatagtgataacctcccaggcaagggaaatgctaaagagaacaaagtgaaaaaagcagttaaggaagaaacgtaccgtagcgtcagtcaactgaatgagcttatagaaaagtattatgtggagaaaaccggacaaagtgtctggaaggttgaaagttatatatcgcgtctggccgaaacaatcaccctggaactgtgccatgagattgaaaatgacgagaagcataatctcatagaggatgatgataaaatcagcaaaatcaaggaattactcgatatgtatatggatgcctttcatattataaaagttttccgtgtgaatgaggtgttaaatttcgatgaaaccttttactctgagatggatgaaatctaccaggatatgcaagagattgtaccgctgtacaaccacgtacggaattatgtgacacagaaaccgtacaaacaggaaaaataccgtctgtattttaacacacctacgctcgccaatggctggtccaaaaacaaggagtatgataacaatgcgatcatactgatgcgcgatgataaatattaccttggcattttaaacgctaaaaagaaaccgagcaagcaaacaatggcgggtaaagaagattgtcttgagcatgcctatgctaaaatgaattattacctgctcccgggcgcaaataaaatgctccccaaagtatttctgtcgaaaaagggtattcaagattaccatccgtcttcatatatcgtggaaggttacaacgaaaaaaaacacataaaaggttcaaaaaactttgatattcgcttttgtcgcgatctgattgactactttaaagagtgcattaaaaaacatccggattggaataagtttaacttcgagtttagtgccactgagacatatgaagacatatccgttttctaccgcgaggtggaaaagcagggctatcgagtcgaatggacctatataaatagcgaagacattcagaagctggaggaagacggacagctgtttctttttcaaatttacaataaagattttgcagtagggtcgacggggaaacctaacctgcacactttatacctgaaaaacctcttctcagaagaaaacttacgcgacatagtgctgaagttgaatggcgaagctgaaattttttttagaaaatcgtctgtccagaagccagttattcataaatgcggctcaatattagttaacagaacgtatgaaatcactgaaagtggaaccactcgtgtccagagcattccggaatctgaatatatggagttatatcgttattttaattcggaaaaacagatcgaattaagcgatgaggcaaagaagtacttagataaagtacaatgcaacaaggccaaaaccgatatcgtaaaggactaccgctacacaatggataagttttttattcacctgcctataacaattaattttaaggtagataaaggcaataacgtgaatgccattgcccaacaatacattgcggagcaggaggacttgcatgtgattggtatcgaccgaggggaacgcaatttgatttacgtcagcgtaattgatatgtatggacgtattctggagcaaaagtcgtttaatctggtggaacaggtatcaagtcagggcaccaagcggtattacgattataaagaaaaattgcagaatcgtgaagaagaacgtgataaagcccgtaaatcctggaaaacgatagggaaaatcaaagaacttaaagaaggatacttgtcttcggtaatacacgagattgcccagatggtcgtaaagtacaacgctattattgcgatggaagatctgaattacggtttcaagagaggacgtttcaaagtagagcgccaggtttaccaaaaatttgagactatgctgatttctaaattgaattatctggctgataaatcacaggctgttgatgaacccggcggaattctgcgtggttatcagatgacgtatgtgccggataatataaaaaatgttggtcgtcagtgcggcataattttttatgttccggccgcgtatacaagtaaaatagatccgaccactggttttataaatgcatttaaacgtgacgtcgtttccactaacgatgccaaagaaaattttcttatgaaatttgatagtatacagtatgatatagagaagggactgtttaaattctcgtttgattacaaaaattttgccacacacaaattgacgttagcaaaaactaagtgggacgtctacactaatggcacgagaattcaaaatatgaaggttgaaggacactggctttctatggaagtagagttgacaacaaaaatgaaagagcttctggatgattctcacattccgtacgaggaagggcagaatattcttgatgatctgcgtgagatgaaagacattactaccatagtgaacggaattctcgaaatcttttggttaacagtgcagctgcggaattctcgtatagataatccagattatgatcggattatatctccggtgctgaataatgatggtgaattcttcgatagcgatgaatacaacagctatattgatgcccaaaaagcgccactgccaattgatgcagatgcgaatggtgccttctgtatcgcattaaaaggtatgtatactgcgaatcaaattaaagaaaactgggtagagggtgaaaaactgccggcggattgcttgaaaattgaacatgcaagctggctggcgtttatgcaaggcgagcgtgga

SEQ ID NO: 652 - DNA, 3840 bp, synthetic construct
  misc_feature 1..3840: note = Sequence codon optimized for E. coli expression
  source 1..3840: mol_type = other DNA
atggaagagaaagaacttggtaaaaatcaaaattttcaagaattcataggagtgagcccgctgcagaaaactttgagaaacgagctgataccgacggaaaccaccaaaaagaatatagcccagttggatctgctgacggaagatgaggtccgtgcccaaaatcgcgaaaaattgaaagaaatgatggacgattattatcgagatgtcatcgacagcacgctgcgcggcgaattactgattgattggtcgtatttattctcttgtatgcgtaatcatctgtccgagaattccaaagaaagtaagcgtgaactggaacgtactcaggatagcgtgcggagccaaattcacgataaatttgcagaacgagctgatttcaaggacatgtttggcgcgtccataattacgaagctcttaccaacgtatattaaacagaattctaagtactcggaacgctatgacgaaagcgtcaaaatcatgaaattgtatggcaaattcacaacgtcactgaccgattactttgagacacgtaaaaatatattttcaaaagagaaaatcagttcggcggtcggttatcggatcgtggaggaaaatgcggagatttttctgcagaaccagaacgcgtacgaccggatttgtaagattgcaggcttagatcttcatggcctggataatgaaattaccgcgtatgttgatggtaaaactttaaaagaggtgtgcagtgacgaaggttttgcaaaggttatcacgcagggtggtattgatcgctacaatgaggcaatcggggcggtgaatcaatacatgaacctgctgtgccagaaaaacaaagcgctgaaaccgggccagttcaagatgaaacgtctgcacaaacagattctgtgtaaaggtacaacgtcttttgacattcctaaaaaattcgagaatgataaacaagtttacgacgctgttaattccttcacagaaattgttaccaagaataatgatttaaaacggctgctgaacattactcagaatgcaaatgattacgatatgaataaaatttatgtggttgccgatgcctattccatgatctcgcagtttatttcaaaaaaatggaatctgattgaagaatgtcttctggactattattccgacaatttaccgggcaaaggtaatgccaaagaaaacaaagttaagaaagcggtaaaggaggaaacgtaccgctccgtctcgcaactgaatgaagtaattgaaaaatactatgtagagaagactggccagtcagtatggaaagtcgaaagctatattagctccctggctgaaatgattaaacttgaactgtgccacgaaatcgataacgatgaaaaacacaaccttatcgaagatgacgaaaaaatttcagaaattaaagaactgctcgatatgtatatggatgtgtttcatattattaaagtgtttcgcgtgaatgaggttttaaattttgatgaaaccttttacagcgagatggacgaaatctatcaggacatgcaagaaatagtaccattgtataaccacgttagaaattatgttacacagaaaccttataagcaggagaaataccgcttatatttccatacccctacgcttgcgaatgggtggagcaaaagcaaagaatatgataacaacgccataatattggtgcgcgaagataaatactatctgggcattctgaatgctaaaaaaaaaccttcgaaagagattatggccggaaaagaagattgtagcgaacacgcatacgcgaaaatgaattactatctgctgccaggtgcgaacaaaatgttacccaaggtgttcctctcaaaaaagggcatacaagattatcaccctagcagttatatcgttgagggttataacgagaaaaaacatattaagggatcaaagaattttgatatacgcttttgtcgcgatctgattgattactttaaagagtgcattaagaaacatccagactggaataaatttaattttgaattcagtgcaactgaaacctatgaggatatcagtgtgttctatcgtgaggtcgaaaaacagggctacagagtcgagtggacgtacattaattcggaagacattcaaaaacttgaagaagatggtcaattatttctgtttcaaatttataataaagactttgccgttggttcgactggtaagcctaacctgcatacgttgtatcttaagaatctcttttctgaagaaaacctgcgtgacattgtgcttaaattaaacggtgaagccgaaatcttttttcgtaagtcatccgttcaaaaaccggttattcacaaatgcggtagcatccttgtgaaccgtacttacgaaataacggagtccggtactacccgcgtccaaagcatcccagaatcagaatatatggaattgtatcgctatttcaactctgaaaaacaaattgaattgtctgatgaagctaaaaagtacctggataaagtacagtgcaacaaggcaaaaaccgacatcgtgaaagattaccgctacacgatggacaaattcttcatccatttacctattacgataaactttaaagttgataaaggtaacaacgtcaacgccattgctcagcagtatattgcggaacaggaagaccttcacgtcatcggtatagatcgtggcgagcgcaacctgatatacgtgagtgttatcgatatgtatggacgtattttggaacaaaaatcatttaaccttgtcgaacaggtcagttcacagggcactaaacgctattatgattacaaagagaagttacagaaccgcgaagaagaacgagacaaggcacgaaaatcttggaaaacaataggtaaaattaaagaactgaaagagggttatttgtcttctgtcatccacgagattgcgcaaatggtagtgaaatataatgcaattatagctatggaggacctgaattacggctttaaacggggcagattcaaagttgagcgccaggtgtatcaaaagtttgaaaccatgttgataagtaaattaaactatctggccgataaatctcaggccgtggatgaaccgggaggcattttgcgcggttaccagatgacgtatgtccccgacaatataaagaatgtggggcgtcaatgcgggattatcttttatgtacccgcggcctacacctcgaaaatcgatccaacaaccgggtttatcaacgcctttaaacgagatgtcgtgtcgaccaacgacgcgaaggagaattttctgatgaagttcgatagtatccagtatgatatagaaaaaggcctgtttaagttttcttttgactacaaaaattttgccactcataaactcaccttagccaaaactaaatgggatgtttatacaaatggcacacgcatccaaaatatgaaagtcgagggtcactggctgtccatggaagtagagctgacaacgaagatgaaagagttgctggatgacagccacatcccatatgaggagggccaaaatattcttgatgatttacgcgagatgaaagatattacaaccattgtcaatggtatcctggaaatcttctggcttaccgtacaattaagaaattcccgcatcgataacccggactatgatagaattatcagtccagtattaaataacgacggtgaattttttgatagcgatgagtataacagttatatagatgcccaaaaggcccctctcccaattgatgctgacgcgaacggagccttttgcatcgccttaaagggcatgtataccgcgaaccaaattaaggaaaactgggttgagggcgagaaacttcctgcagattgtcttaagatcgagcatgcctcctggttagcgtttatgcaaggtgaacgtgga

SEQ ID NO: 653 - DNA, 3864 bp, synthetic construct
  misc_feature 1..3864: note = Sequence codon optimized for E. coli expression
  source 1..3864: mol_type = other DNA
atggtgggcaataaaatttccaactcttttgatagcttcaccggaatcaacgcactgagtaaaaccctgcgtaacgaattgattccaagtgactataccaaaagacacattgctgagtcggacttcattgccgctgatactaacaaaaacgaggatcagtatgtcgcaaaagaaatgatggatgactattaccgtgatttcatcagtaaagttttggataatctgcatgatatagaatggaaaaacttgtttgaactgatgcataaagcgaaaatcgataagtccgacgccacgtcaaaggaactcattaaaatacaagatatgctgcggaaaaaaatcgggaagaagtttagccaagacccggaatataaagttatgttatcggccggcatgatcactaagatattaccgaaatatatcttggaaaaatacgaaacggaccgcgaggaccgtcttgaagcaataaaacgtttctacggctttaccgtttattttaaagagttttgggccagcagacagaacgtgtttagtgacaaagccatcgccagtagtatatcgtatagaatcattcatgaaaacgccaagatatatatggataatctggacgcttataacagaatcaaacagatcgcatgtgaggaaatagagaagattgaggaagaagcttacgactttcttcagggtgaccagttggatgtagtctatactgaagaggcctatggcagatttatttcccaatctggtattgacctgtacaacaatatctgtggagtcattaatgctcatatgaacttatattgccagtcaaaaaaatgctcacgatccaaattcaaaatgcaaaaactccacaagcagatcctgtgcaaggccgaaactgggtttgagataccgctgggctttcaagacgacgcacaggttattaatgccataaactcatttaacgctcttattaaagagaaaaatattatttcacgcttgcgtactattggaaaatcaatttctctgtacgatgttaataagatttacatttcgtcaaaagcgtttgaaaacgtgtctgtttatattgatcataagtgggatgtcatcgcgagcagtctgtacaaatacttcagcgaaatcgttaaaggtaacaaagacaatcgtgaagaaaaaatccagaaggaaatcaaaaaagtgaagtcgtgcagtcttggcgacttgcagcgattggttaacagctattataaaatagattcgacctgcctggagcacgaagtgactgagtttgttacaaaaataattgatgaaatagacaacttccaaatcaccgacttcaagtttaacgataagatatcactgatacaaaatgagcaaattgtcatggacatcaaaacttacttggacaaatacatgagtatctatcattggatgaagtcttttgtcattgacgaactggtggataaggacatggaattttatagtgaacttgatgaacttaatgaagatatgtctgaaattgtcaatttatataataaagtgcgtaactatgtgacccagaagccttatagccaggaaaagataaaacttaatttcgggtccccgacgcttgctgatggctggagcaagagcaaagagttcgataacaatgcaattattttgattcgagatgaaaaaatttacctggcgatcttcaacccccgtaacaagccggccaaaaccgttatttcaggtcacgatgtttgtaattcagagacggattataaaaaaatgaactattatttgttaccgggagcaagcaaaactttgcctcatgtctttataaaatcccgtctgtggaatgaatcacatggcattccagacgagattttaagaggctatgagttagggaagcatttaaagagtagtgtcaattttgacgtcgaattctgttggaaacttatcgattactacaaagaatgtatctcatgctaccccaactacaaagcctacaatttcaaatttgctgatacagaaagttataatgacattagcgaattctaccgtgaagtcgaatgccaggggtacaaaatcgactggacgtatattagctctgaagacgttgaacagctggacagagacggccagatttatctctttcagatatacaataaggattttgcgcctaattccaaaggaatggacaacctgcacacgaaatatctgaaaaatatcttcagcgaagacaatctgaaaaatatcgttattaaactcaatggtgaggccgaacttttctatcgtaaatcttctgtgaaaaagaaagttgaacacaaaaagggaacaatccttgttaataaaacctataaagtcgaggacaacactgaaaactccaaagaaaaacgcgttatcattgaaagcgtacctgatgattgctacatggaactggtagactattggagaaatggcggaattggcatactgagcgataaagctgtgcagtataaagacaaagtatctcattatgaagctaccatggacatagttaaagaccgtcgctatacagtagacaagtttttcattcacctgccgattacaataaattttaaagctgatggccgtatcaacatcaacgagaaagtgctcaaatatatagccgagaacgatgaactgcatgtgatcggtattgatagaggtgaacgcaatctgttatatgtgtctgttatcaacaaaaaaggtaaaatcgttgagcaaaaaagctttaacatgatcgaatcctacgagaccgtgactaacattgttagacggtacaattacaaagacaaactcgttaacaaagaatcggcccgtacagatgctcggaaaaattggaaagaaattggtaaaattaaagaaattaaagaaggttacctcagccaggttatacatgaaattagcaaaatggtcctgaaatataatgcgattatcgttatggaggatctgaattacggatttaagcggggccgctttagagtcgaacgtcaggtgtaccaaaaatttgagaacatgttgataagtaagctggcctaccttgtggataaatcgcggaaggccgatgaaccgggtggggtacttcgcggctatcagctgacatacatccctgattcgctggaaaaattaggtagccagtgtgggatcattttctacgttcccgcggcatataccagcaagatcgatccgctcacgggatttgtgaacgtattcaattttagagaatacagcaatttcgaaaccaagttggactttgttcgttcacttgattccattcgctacgacactgaaaagaaactttttagcatcagtttcgattacgataattttaagacacataataccacattggcaaagacaaagtgggtgatttatctccgtggagaacgcattaaaaaagaacacacgtcctatggctggaaagatgacgtatggaatgttgagagccgtatcaaggatcttttcgatagctctcatatgaaatatgatgacggacataacctgatcgaagatatactggaacttgaatcctcggttcaaaagaagctgattaatgagcttattgagattatccgccttactgtccaacttcgtaattccaaatccgaacgttatgatcgcacagaagcggagtacgaccggatagtgtcgcccgttatggacgagaatggtcgtttttatgattcggaaaactacatcttcaatgaggaaacagaactgccaaaagatgccgatgcaaatggagcgtattgtatcgcccttaagggtctgtataacgtcattgcaattaaaaataattggaaggaaggcgaaaagttcaatcgtaaactgcttagcctcaacaattataattggttcgattttatacaaaatcgccggttt

SEQ ID NO: 654 - DNA, 3717 bp, synthetic construct
  misc_feature 1..3717: note = Sequence codon optimized for E. coli expression
  source 1..3717: mol_type = other DNA
atgaaagaattcactaacttgtatccagtaagtaagactttacgttttgagttaattccagataaacgcaccaaagaatatttggaacactccgatctcattgctaaggatgaacatcgcgcggagtcgtataagatcgtaaagaagataattgatcgctaccataaaaaattcattgacgacgtgctgtccactacgaaattgcaatatacgaaagagggcaaactgaatagtctggaagatttttattttttgtacaccaattcgaacaaaaccgatgctgacaaaaaggcactggataaggtcaaagagctgttgcggaaacaaatcgttgatgcgttgaaacaggataaccgctttaaacgaatagacaaaaaagaactgattcgtgaggatatcctgcaggtaattaaaccagaagaacgcgcgctgatagatgagttccaggattttactacgtattttacagggtttcatgaaaacagaaaaaatatgtatagcgctgaagcccaatccactgctattgcgtaccgtctgattcatgaaaatcttccaaaattcgtagacaatatagcaatttttcaaaaaatcttaaaaagtccaattgcggaaaacttaccaaccttgtataaagatatggaggaatacttgaacgtaaattccattgaagaaatgtttatgttagattactacagtgatgtattgacacagccgcaaatagaggtatataatgccatcattggaggcagaactctggaagatggtacaaaaatacagggcgtcaacgaatttgtcaatttgtttaatcaacaacaaacgagtcgggataatcgtttacctaagttaaagcctttgtttaagcagatactgtctgataaagaagcgattagctggttgcccgaagaatttgaatccgatcagcagcttctgaacgccgttcgcgaattttatatcagccttaccaacaacgttatgcagcaattaaaggaacttcttctgaacctgcctaattacaacctggacaaaatttacatcccgaatgatttagctctgacagatattagtcaagctctgtatggggattggtcagttataaaaaatcgtatttacgaggactttaagaatgagaatccgcagaaaaagaatgaaaagacggaaaaatacgaggaaagaatttcaaaacttattaaagaaaaagacatttttaatattggttacctgaactcgtgccttaccaatcagactaaagacgtttgtgcacactttacgtctcttggtgccgttaacacggaggcgaagcaaactgaaaatattttcctgcaaattgaaaatgcatatacggatgtccgtgaattacttgaatatgactatccgcaggacaaaaacctgtcgcaggatcgaatacaagtcaacaaacttaaaacattactggatgcaattaaaaaccttcaacacttcgtgaagccactgctggataccgagaacgaagcggaaaaagacgaaagattttatggcgagttatcagtcctgggagaagaattgaatcgtattactcctctgtacaataaggttcggaatcgcatgacacggaaaccctactcgattgaaaaatttaagctgaattttgagaacagtacgctgctggacgggtgggacgtgaataaagagcgcgataattcctgtgtgatcttacgtcggaatggattgtactttcttgccattatgcgtaaagacagcaataagattttcagtgatgctccagttggcgacggcaaggattactacgagaaaatggaatacaaactgttgccaggtgctaacaaaatgctgccaaaggttttttttagtaaatctcggattgacgaattttgtcctagccctagtttacttgaacattatgagcagggcacgcataagaagggtgaaaagtttagcttgaaggattgtcatgaattaatagattttttcaaaaccagtatcaagaaacacaaagactggtcacagttcaatttcaagttttcgccgaccgagagttacgaagatctttcaggtttctaccgtgaagttgagcagatgggatataaaatcacgtataaaaacatccccgtctcttacattgatacaatggtcagcaaaggacgtcttttcctgtttcaaatttataataaggacttctctccatactcaaaaggaactccaaatcttcataccctgtattggaaaatggtgtttgatgaacagaatctggccgatgtagtatataaacttaatggtcaggcagaaatattctatcgtaaaaagtcgttaaacttaggcaaggtgacacaccctgcaaatcaggcgattaaaaataaaaaccagctgaaccctaaaaaagaatcatcgtttaaatatgacctgattaaggataagcggttcacggttgataaattccaatttcatgtcccgataactatcaactttaaagcgattggccttggcaatataaatcagtctgttaacaagtatatccagaattctccggacttacatataatcggtatagaccggggggagagacaccttctttatataaccgttattgattctaaaggtaatatcaaggaacagttctctctcaatcaaatcgtaaatatgcataaaggcaatacttatgagaccgattatcacgaactgttagacaaacgtgaggaggaacgtcaaaaggaacggcagtcctggaatacaatcgagagcattaaagaattgaagcagggatatctttcacaagtaattcataaggttgtgacattaatggtaaaatataaagccattgttgttttagaagatttgaatatgggctttaaacgcggacgtcagaaggtagagagctcagtgtaccaacagtttgagaaggccctcattgaaaagcttaactaccttgctgataaacagcagaatccgaatgaatacgggggtcttctgaaaggtttccagttgacgaataaatttacttcattccgggagatgggaaaacagaatggatttctcttttatatcccagcatggaacacttcgaaaatcgatccggtgaccggcttcgtagatttgcttcatcctaagtatgaatcagttgaaaaagcgcgtgcatttatctgtaaatttaaaaacatccgttttaatgagaataaaggatggtacgaatttgtttttgattataatgattttaccactaaagcagaggggacccaaactacatggacattgtgcacgcagggatccagaatcgaaacatttcgcaacaaagagaaaaactcaagttgggataatcgggaaattaatctcactaaagaattccactccctgttcgagagctgcggcattgcaccgaacgaaaatcttaaagaagtgattgcaaaacagaccgaaaaatcgttttatgaacgcctcttaaaattgttaaatttaacgttacaaatgagaaacagtatcaccggtacggatatcgattatttaatttctccggtagctaatacggatgggaagttttatgatagccgtaactgcaaagatagccttccggaaaacgctgatgcgaacggggcctacaatatcgcacgaaaggggctttgggtggtccgacagattcagcaggccgccaataccgataaggtccagttctcgatcacaaataaagaatggctcaacttcgctcaaacgaaaccgtacttaaatgat

SEQ ID NO: 655 - DNA, 3783 bp, synthetic construct
  misc_feature 1..3783: note = Sequence codon optimized for E. coli expression
  source 1..3783: mol_type = other DNA
atgaaacaatttactaatctgtaccaactgagcaaaacgctgagattcgaactgaaacctatagggaaaactaaagagaatatcgaaaaaaacggaattctggaacgcgataaccaacgcgacattgcttacaaggcggtaaagaaagtgattgatgagtatcacaaagcttttatagaaatgatgttgaatgactttgagttacaatatgagttacttgaggagtatcatcacttatatcatattagcaattcagaagaaccgaaaaaaaaagagaaacttcaaaagatccaagaaaatttgcggaaacagatttctgaccgtttcacgaaatccgaacaatataagcggttatttggcaaagaattaatcaaggaagatctctccgagtttgtaaaaacaccccagttcggtaattatattcgcgcgcagaagggtgatgaatataccgacgagcaagttcgccagattcaagaacgaacgttagaagatatagatcaatttaaagattttacgacgtactttagtggttttcatcagaaccgccagaacatgtacgtggcagacgataaagcgacctcgattgctcatcgcatgatcgacgagaacctgccgaagtttattgataacatgaaaacctttgccgagattgctgaatctgatgtagcggagcattttgctgatctctacaaagaaatggagtcctacctcaacgtgagcgacatccgcgaaatgtttcagttagactatttttccatggttttgacgcaaaaacaaatcgatgtttataatgcgattataggcggtaagaccttagccgacggtaccaaaatacagggtctgaatgaatacgtaaacctgtacaatcagcaacaaaagaaaaaagaggaccgcttacctaaactcaaaccattgtttaagcagattttgagcgaacggaatgctatttcttggttacctgaagaatttaaagacgacaatgaaatgcttcagtcaatagggaaatgttatcaggacctgaatacattagttttcggtaaactgaagaccttacttgagacactgaatgattttgacctggataatatttatcttcccaacgacttgcagcttaccgatatcgcacaaaagcactatgggtcctgggccgtgataaataaagccattgaagaagacctgaaaaccgttaatcctcagaagaaacgcgaaagtggggagaagtacgaagaacgaatagccaagctgttaaaagctaatgactcatatagtattggatatattaattctttgctgaaggaccgtatggaggactttaaaccacttgaagcctacttttctaacattggtgctgaagacgatggaaaacaacagaaacttagccactttgcacgcatcgaaaatgcctacacagaggctaagtctctgctgaccgcagaatatccggatgataaaaagctttcccaggacaaagcaaacgttgaaaaaatcaaaaatttattagacgctattaaggatttacagcgcttcgtgaagcccttattgggctgtggaacagagtcggataaagattcacatttttatggagagtttacaccgctttgggaacagttagatcagatcactccgttatataacatggtccgaaatcgtatgacacaaaaagcttattctgttgaaaagatcaaaatcaactttgataattctacattgctggcaggttgggacttaaataaagaggcagataacacttgtacattgctgcgaaaagatggcttgtattatttagttatcatggataaaagcaatagcagagtgctgaaggccgaaaacctgcttagtgacggggattgttacgagaagatggaatacaaactgttaccgggcgcaaataagatgttgccgaaagttttcttttcaaagtctcgtattggagaatttcagccctccgagtctgtcttagaaaactacaaaaacgaaacgcacaaaaaaggggataattttaacatcgatcactgccacgaactcattaacttttttaaaaaatcgatcggcaaacatgaagactggagcaagttcggttttaaattttcagacacccgtacctatcaggatctgtcaggtttttaccgggaagttgaacaacagggttataagataaccttccgaaatgtttctgtggattatatcaatcagttagtcgatgaaggtaaaatatacctttttcagatctacaacaaagattttagcccgtatagtaaagggacgccgaacatgcataccctgtattggaaaatgttatttgatgagcgcaacctcgcggatgtagtctataaactcaatggcgaagctgaagtgttcttccggaaaaagtccgttaaagtggaacgtcctacacatcctgcgaatcagccgatcgccaataagaacgcgcaaaataacaaaaaagagtctaccttcgcatatgacctgatcaaggaccgaagatatactgttgataaattccagttccacgtaccgataaccatgaattttaaagcagccggtctgaataacataaacccccttgtgaatgaatacctgaaaatgtccaacaccacacatattattggtattgaccgtggcgaacgtcacctgttgtacctgtctctgatagatttaaagggaaatatcgtcgaacaatactctctgaatgaaattgggaacatttaccctacaaattatcgggacctgctcaacgcaaaagagaaacagcgagacgaagctcgccgttcatggcaaactatcgagaatatcaaggagttgaaggaaggttatatgtcccaggtagttcacaagattgcgcaactgatgctgaagtacaacgctattgttgttctggaggatttgaactttggctttatgagaggaagacaaaaggtagaaaaaaatgtctatcagaagttcgaaaagatgctgatagacaagttaaactatctggtggataagaaactggatgccgatgccatgggcggggtgctgaatgcttaccaattaacaaacacgtataaagtatttcatgaccaatacaaaaaacagcaaaatacaatagggaaacaatgtggatttttgttttacattcccgcgtggaatacatcaaaaatggatccgactacgggtttcgttaatctgctcgatacacgctatgagaacatggaaaaagccaaagcgttctttggaaaatttgattcgattcgctatgacgcacttaaggattggtttgaatttgcattcgattataacaattttcataataaagccgaaggtacaagaacccaatggacgttatgcacctatggcacacgtattgaaactaaacgcgacgccgctcagaataataattttgtgtcgacggaagtagatttaacgcagaaattcaaggccttattcgctgagaaacaaattaatccgagtggtaacctgaaagaacaaatttgcaatcagaccgatgcaagcttttttaaatcgttattgaacttattacgtctgaccttgcaaatgagaaacagtataacaggaacggagactgattacctgatatctcccgtacaaaacgctaacggggaattctatgatagtagaaaatgcgatgccaacttaccggagaacgcagacgcaaacggtgcatataatatcgcgcgaaaaggcctgtgggttattgaacaaatgaagcaagctgacgatctttcgaatattaaattggcgataagcaataaagaatggttaagaagtgcgcagaaactggaa

SEQ ID NO: 656 - DNA, 3753 bp, synthetic construct
  misc_feature 1..3753: note = Sequence codon optimized for E. coli expression
  source 1..3753: mol_type = other DNA
atgaaagatttaaaacggtttataggaatatacccagtctcgaaaactttgagatttgaactgagaccggtggggaaaacgctcgaatggatcgagaaaaataaggtactggagtcagatgagcaaaaagctgaggattatcctaaagtgaagacgctgatcgacgagtatcataaagtttgtatccgtgaaagtctgaaagatgcacactttgattggatgcccctgcgacttgcgctggaaaaataccagaaatcgaaatcggatgaggacaaagcagcgttagaaaaagaacaggctgttatgcgcaagcaaatcgcaacggctatcaaggaatttcgacattacaaagagttgaccgcacctacgcctcagaaacttatcgataatgtatttcccggtatttacgagtctgatgcgctgaaatcctttaatcgcttctcagtctatttccgtggtttccaagaaaaccgcaataatatatattcggccgaagcgatatctactggcgttccgtatcgcctggttcacgacaactttccgaaatttttagctgatattgaggtgttcggtaacataaaagctaattgcccggaagtaatcgaacaggcagcaaccgagctgcaaccaatattggagggtgttatgctggaagacatctttacgatcgatttttataattctcttctcacgcaggacggcattgatttctttaatcaagtattaggcggcaccgcagaagaagataaacagaaatatcgcggtatcaacgaattctccaatctttatagacagcagcatccggagctgacggccaagaaaaaggccttaaccatgattccactttttaaacagatcttgagtgatagagacaccctttcttatattccacagcagattgagagtgagcagcaacttattgaactgctgaatcaattttacagccatatcactgcattcgatcataacggcaaaactgtagatgttcttaaagagttaactaaattaacaggcaatattaataattacaatcccgatggtatatacctgtcggcgaaatcgttaactgacgtgtcacagaaactgttttctaaatggaatatcattaccgaacgtctgagtgaagaagccatcaaacgttttggagacgtgtcaattactaaaaacaaaaagaagattgatgcgtatctgtctaaggacgcatacgcgcttagtgaaatccctctggacaatgaacactctttgtctatgttttttgcggagttaccgaaaaatatagaaaatgtgggtagcaattggctgcagtttatggagtggtgcaaaggtgaatcaaaacagctttttctgaacaatgccgacggcacagagattgtgaaaaattttctggactcgataatggaaattttgcaccgttgcagcgtcttggtcgtgagtgtggaacatgatctggataaggatttctataatgattttctgccgctgtatgcggaactggaaaacgccgttatggtctataaccgggttcgaaacttcttaactaaaaaaccgtccgatacgaaaaaatttaaattaaattttggtgtgccttctctgggcgatggctgggaccagaacaaagaacgcgacaataaagcaattattctgtttaaagatggcaaatcatatttgggaatcatgaacgcaaaagatatgcctatgatcaaagaacggaatgaatcgaccccgtctagttataagaagatgatttataaactcctggcagatcccgcaaaagattttccgcacaccttttttagtaaaaaaggtatagacacataccaccccagctggtatatactggacggtcgcgaacagggaaagtataagaagggcgaaacgttcgacaaaaaattcatgagagacttcatcgatttttataaagatgccgtcgctaaacatccaatctggtctaaattcaattttgtttattcccctaccgagagctatgaagacattggtgccttcttcaatgaagttagtaaacaagcgtataagattcgcttcagctatatagaagaatcgcagatcaacgaatggattaacaatggtcagctgtacctgtttcagctgtacaataaagactatgcggaaggggcaagagggcgaaaaaatttgcacacattatattgggaaagcatttttagccctgaaaatttaagcaatattgtccttaaactgaatggacaggctgaactgttctacagaccgcagagtataaaacagcctgtcacccataaaatgggtagcaaaatgttgaatcgacgggataaatctgggatgcctattccggaggctatctaccgatcactgtatttgtacttcaattctaagaagaccgagtccgaattaacattagtggagaaatcttacctggatcaagtagttgttaaagacgtgacgcacgaaattgtcaaggaccgccggtatacaaaaccggaattcttctttcacgtcccgataactttcaatgttaatgctgatgggaatgaatacatcaacgagcaagtcatggaatatttgaaagacaatccagacgtgaacatcattgggatcgatcgaggcgagcgtcaccttatatacctgacacttattaaccagcggggtgagattctgaaacaaaagacattcaacatggtaggtaattataactatcacgccaaacttgagcaacgtgaacaggaacgtgatcaggcgcggagaagctggcaatctattgggagaataaaagaattaaaagagggatttctttctgccgtgatacatgaaatcaccatgatgatgatcgaaaataatgccatagtagtcctggaagatctgaatttcgggtttaaacgcggtcgtttcaaagtggaacgtcaggtttatcagaagtttgaaaaaatgctgatcgataaattgaattacctgtcattcaaagatcgtaaaacggatgatgcagggggtattttacgtggttaccagttagcgcaacagtttacatcttttcagcgcctcgggaaacagagtggctttctgttctatattcctgcagcttatacatccaagatagacccagttacgggctttgtcaatcactttaattttaacgatattacgaacgcggaaaaacgaaaagcattctttatgaaaatggaacgtattgagatgcgcaacggtgacattgaattcgaattcgactatcggaagtataaaacatatcaaaccgattaccaaaatatatggaccgtgaatagtagcggtaagcgcattgtgatgagactggatgaaaatggacgcaaaaaaatgaccgattattatcctactcaggaaattgtccgcgcgttcaaagagaaaggtatgcttttaaatgaaggagccgacattaaagccctgttagctgatatcgatgcaagtccgatgaacgcaagcctttatggagtaatgttctacgcatttcaaaagaccctgcaaatgcgtaattcgaattccacaactgaggaagactatatactctcaccagtcgcgcaaaatggcaaacagtttaatactgatactgaagccaataagggccgtgatacaaatggtaactggattagtaagttacctgttgacgcagatgcgaacggcgcctaccatattgcgctgaaaggcttatatttgctgatgaacccccaaacgaaaaaaattgagaatgaaaaatggctgcagtttatggtacaaaagccttataatgat

SEQ ID NO: 657 - DNA, 3729 bp, synthetic construct
  misc_feature 1..3729: note = Sequence codon optimized for E. coli expression
  source 1..3729: mol_type = other DNA
atgaaaacgtttaatgatctgacgggactgtattcccttagcaaaacacttcgctttgaactgaaaccggtgggcaaaactaaggacaacattgaaaccaaaggcataatcgctcaggatgaaaaacgcgcagaagagtataagaaagttaaggacatcattgacagataccacaagaagttcattgaaatgtgcctcgctaatctgaagcttaaaaccatttctgatggaaataatgactcactgaaggagtatgtgacgcttgcaagtaaagcaaacaaagacgaaaaagaagataacgactttaaagatgttaaaacggcgctccgtaagcagattgtagacgcctttaaaaaggggggttcttattctgatctttttaaaaaagaattgattcaagtccatcttccggattttgtcaccgacgaacaggaaaagcagatggtcgagaactttgggaaattcacaacatattttactggctttaatgagaatcgtcaaaacatgtattccgacgaagaaaaatctacctccatagcgtatcggcttattcatgaaaacctgccaatgttcattgataatattaaatcatttgccaagatagcagagcatgaagatatcgattttctccccgatattgagaatggcttcaaagaagaattaaagcgccttaaagcacagtcgatatctgaagtgttcgaccttgcaaatttcaccaataccctgacgcagtcacagattgattcgtataacgcaattattggtgccagacacgacgagaatggtgacaaggttcaaggcattaatcagtatgtaaatctctataaccagaaaaataaagacgctcgtttaccattacttaaacctttgtataaaatgattctgagtgatcgtggggccctgtcgtggttgcctgaagaattcgctaccgatgaggaaatgctggcggcaattaatgagacacacgggaatctgaagaacgttatgacagatgttcgtaaacttttacagaatattgacagttatgacactgagcacatatatattgccaatgataagggtctgacagacattagtcagcagatttttggtcagtatgatgtctacacctccgcgatcaaagcggagctgagagatagcattaccccaagcgcaaaagaacgcaaagatccagaattgctcgaaaagcgtataaatgacatttttaaggcgtcaaaatcgttttcgatcgaatatttaaactcgcacgttgattccgacaaaacaattcagtcctactataaagagcttggtgcgtacgatcggaatggagaacagcgtattaacctgttttcgcagattgagcttgcctatgtggatgcacatgatgtactgctgggtaaacacaccaatttaaatcagagtgaagacagcatcaagaagataaaagctttactggatgcctataaagccctgctgcactttatcaaaccgttactcggtaatggcgatgaggccgacaaagataatgaattcgatgcaaaattgcgagcaatctgggatgaactggatatagtcacaccattatacgacaaagttcgcaatcggctgactcgcaagccctacagcacagaaaagataaagctcaacttcgacaacgcgcagctgttaaatggttgggatatgaataaagaaccggattgtacgtcggttttgttgagaaaggacgggcagtattatctcgcaattatggataaaaagtcaaatcatgcatttgatattgacgagttaccttgcaatggagaatgttacgacaaaatggactataaattgctgccgggtgctaataagatgcttcctaaagtttttttttcaaaaagccgcattaaggagtttgcgccttctaaggaaatctgcgacgcgtaccagaaaggtacccataaaaaaggtgctaattttagtatcaaagattgccgtcgcctgatcgattttttcaaagattctattgccaagcatgaagattggtcaaagtttccatttactttcagtgatacctcaacgtatgaagacataagcggcttttatcgtgaagtggaacaacaaggttatatgcttgggtaccgtaaagtttcagttagctttatcaatcagttggtggacgaaggaaaactgtatttattccagatatggaacaaagatttttcggagtactccatgggtaccccaaatatgcatacgctgtattggaaaatgttgtttgacgagcgcaacctggcgaacgtggtatacaaactcaatgggcaggcagaggtattttatcggaaaaaatcgcttgatctgaacaaaacgactatacaccgcgcaaatcagcccattgcgaataaaaatatgcaaaatgaaaaacgcgaaagtaccttttgctacgatatagtaaaaaaccgccgctacaccgttgataaatttcagttccatgtgcctatcaccattaacttcaaagccaccggtagtgataacatcaacgcatctgtcctggacgtgatccgtaacaacggaattgaacatatcattggaattgaccgtggtgagcgccatttactgtatctcagtctgatcgatatgaagggtaatatcgtaaaacagatgaccctgaacgacattattaatgaatataaaggcaacacttatacgacgaattataaagagctgctgcaggcaagagaaggtgatcgaaaggaggcgcgccagaactggcagaaaattgagaacataaaggagctgaaagaagggtacttaagtcaggtggttcatgtgattacgaaaatgatggttgagtataaagccatagtagtattggaagatttaaatggtgggttcatgagagggcgacagaaaatcgagcgtcaggtttacgagaaatttgagaagatgcttattgacaaactgaactattatgtggacaaacagcgggacgcgaacgaaaatggcggtttgctccatgcctatcaattggcttctaaattcgatacctttaaaaaacttggtaaacaaagcggatgtctgttttatattccggcctggaatacatccaaaatagacccggttacagggtttgtcaatatgctggatactcgttatgagaatgctgataaagcgagaaactttttctctaagttcaagtctatcaactacaatgcggataaaaattggttcgaattcgttattgacgattactcaaaatttactgacaaagcgaaagatacgagaactgactgggtgctttgcacctatggtacgcgaataaagacattcagaaatccggaaaagttaaatcaatgggataacaaagaaatagttttgactgacgaattcaaaaaagttttcatggaagccggtatagatataaacggtaatctgaaggaggctatttgtaccctgaccgaaaagaaacacctggaatctctgatgcaattaatgaaattactggtccaaatgcgtaacagtgagacaaactcggaggttgattacctgctgtcgccggttgcagatacagagggccatttctatgactctcgcaattgcggcgataaccttccgaaggacgcagatgcaaatggggcatataacattgcccgtaaagggctgtgggccgttatgaagataaaagcctcaaagccgcaggagaatcttaaattagggataagcaataaagaatggcttcagtttgcccaagaaaaaccatatttgaacgat

SEQ ID NO: 658 - DNA, 3615 bp, synthetic construct
  misc_feature 1..3615: note = Sequence codon optimized for E. coli expression
  source 1..3615: mol_type = other DNA
atgtattatcagggcctcacgaaactgtatcctatctcaaaaacgataagaaacgagctgattccagttgggaaaactctcgaacacattcgcatgaataacatactggaagcggatattcaacgcaagtcggattacgaacgtgtaaaaaaactgatggatgactatcataaacagttgattaatgagtcactgcaggatgttcacctcagttacgtggaagaagccgccgacctctatctgaacgcgtccaaggataaagatatcgtggataagttctcaaaatgccaagacaaattacgtaaggagattgtcaatcttctgaagagccacgagaacttccctaaaattggcaacaaagaaatcattaaattactccaatccttgtccgatacagagaaagactataatgctttggattcttttagcaaattttacacctattttactagttacaacgaggtgcggaaaaacttatactctgatgaagaaaaatcttcaacggctgcatatcgtctgattaatgaaaatttgccaaaatttcttgataatattaaggcttatagcattgccaaatcggcaggtgttcgcgcaaaagagttgaccgaagaagaacaagattgccttttcatgacggaaacttttgaacgtaccttaactcaggatggtatagacaattataatgagcttattggtaaattaaattttgctatcaacctctataaccagcagaacaataaactgaagggtttccgtaaagttcctaaaatgaaagaattatacaaacaaattctgtcggagagagaagcctcatttgttgacgaatttgtcgatgatgaagcactgcttaccaatgtagaatccttttccgcccacataaaagaatttttagagtcagattccctgagtcgctttgcggaagtgcttgaagaatctggcggcgaaatggtttacatcaaaaatgatacgagcaaaaccaccttttctaacatcgtcttcggcagctggaatgtcattgatgagcgcctggccgaagagtacgatagtgcgaacagtaagaaaaaaaaagacgaaaaatactatgacaaacggcataaagaacttaaaaaaaataaatcttactctgttgagaaaatcgtcagtttgtccacagagacggaagacgttattggcaaatatatagagaaattacaggcagacattatcgccatcaaagaaacacgtgaagtcttcgaaaaagttgtgcttaaggagcatgacaaaaacaaatctctgcggaaaaacacaaaggcaattgaggcgatcaaatcctttctcgatacgattaaagattttgaacgggatattaagttgattagtggttccgaacatgaaatggagaaaaacctggctgtatatgccgagcaagagaatatattgtcttccatccgcaatgtggattctttatacaacatgtctcgtaattatttgactcagaaaccttttagtacagaaaaattcaaattaaatttcaatcgagccacactgttaaatggatgggataaaaataaagagacggataacttaggcattttgctggtgaaggaaggcaaatattatctgggtatcatgaatactaaagcaaataaaagttttgtaaatccacccaaacctaaaaccgacaatgtatatcataaagtcaattataaactgctgcccggcccaaacaaaatgcttccgaaagtttttttcgcaaaatccaacctggaatattataagccgagtgaagatttgctcgccaaatatcaggcaggtactcataagaaaggggaaaattttagcttagaagattgtcattccctgatcagtttctttaaagactctctggaaaaacatccggactggtctgagtttggattcaaattttctgatactaaaaagtacgatgatttatccggtttctaccgagaagtagagaaacaaggttataagataacgtacacggatatcgacgttgaatacatcgatagccttgtggaaaaagatgaactgtacctctttcaaatttataataaagatttttccccttattccaagggcaactacaacctgcataccttatatctgactatgctttttgatgaacgtaaccttcgtaatgtcgtatataaattaaacggggaagctgaggttttctatagaccggcgtccataggtaaggatgaattgattattcataaatccggagaggaaattaaaaataagaatccgaagagagcgatcgacaagcctacgagtacgtttgagtatgacatagttaaagatcgacgctatacgaaagataaatttatgcttcatatacccgtcacaatgaacttcggtgtggatgaaacgcgccggtttaatgaagtcgtaaacgatgctattagaggcgatgataaagtgcgggtgatcggtattgatcgcggtgaacggaatctgctgtatgttgtagttgtggatagtgatgggacaatcttagaacaaatcagcttgaatagtattattaacaatgagtattccatagaaaccgactatcataagctcctcgacgagaaagaaggcgaccgagaccgcgcacgtaaaaattggactactattgagaatatcaaagagctgaaggaaggctacctttcacaagtggttaatgttattgcaaagctggtcttgaaatatgatgccattatctgccttgaagacttaaatttcgggttcaaacgcggccgtcagaaggtggagaagcaggtgtatcagaaattcgaaaagatgctgattgacaaactgaattacctggtcatagataaatcgcgtagtcaagaaaatccggaagaagtgggtcacgtcttaaatgccttacagctgacaagtaagttcacaagcttcaaagaactcggtaagcaaacaggcattatatactatgttccggcttatctgacctcgaaaatagacccgacaaccggctttgccaatcttttttacgtgaaatatgaaagtgtggagaaaagcaaagattttttcaatcgctttgactctatatgcttcaacaaagttgctgggtattttgaattttcttttgattataaaaattttaccgatagagcttgtggtatgcggagtaaatggaaggtctgtaccaatggagagcgtatcattaaataccggaacgaggaaaaaaattcttcattcgatgataaagtaattgtgttgactgaagagttcaagaaattgttcaacgagtatggcattgcgtttaacgactgtatggacctgacggatgcaattaacgcgatcgatgacgcgtcttttttcagaaaactgactaagctgtttcaacagactttacagatgagaaatagcagcgcagacggttcacgtgactatataataagcccggtggaaaatgacaatggcgaattttttaattcagagaaatgcgataaatcaaaacccaaagatgctgatgcaaatggtgcgtttaatatcgcgcgtaagggcctgtgggtgttagaacaattatataactcatcctcaggagagaagttaaatctggctatgacaaatgcagaatggctggaatatgcgcaacagcacactatc

SEQ ID NO: 659 - DNA, 3732 bp, synthetic construct
  misc_feature 1..3732: note = Sequence codon optimized for E. coli expression
  source 1..3732: mol_type = other DNA
atgaaagatctgaaacaattcatagggatctacccagtcagcaaaaccctccgttttgaactgaaaccgattggtaagacacaagaatggattgaaaagaaccatgttttagagcatgattggaaacgcactgaagactatccaaaggtcaaagaaatgattgacgcatatcataagctgtgtattggtaaatctttgaaaaatatggattttgactgggtgccgcttcgagatgcgatcgaacgcaatcgtcaggaaaagtccgacgggtccaagaaagccttagaagcagaacaaacgaaaatgcgaaacaaaattcatgaccagttatcgaagttcgagcattacaagaagttaaacgcagatacaccgagtctgctgattaaccatattcttccgcaggaagatgccctggagagtttcaaaaaatttgccacatattttgaaggtttccaaaaaaatcgtaaaaatatttacagcaaagaagccatttctacaggtgttccatatagattggtacatgacaactttcctaaattccttgcgaatatagaagtttttgaaaatctgcaagaactgtgcccagaggtcatccaacaggcagctactgaaatggcgcctttcctgcaaggcgttatgatcgaagatgtatttacagtgggtttctataatacaatcctgactcaagatgggatagatttctataaccagattctgggaggcgttgtgaaggacgagcgtcattatcagggcattaaccagcttaccaatctttatcgccaggcccatccggatctcacggcgaaccgccgctcgatgaccatggtgccactttttaaacaaatcttaagcgatcgcgaaaccttaagtgacatcagcaaaccaattgagtcagaagagcagctgattaagactgtaacatcattctaccgtcgtatcactgacttcacattgaatggaaactgtgtcaacattataagcgaacttgctgctttggcacagtctctgaacacatataacccagaagggatttttataagtgccaaaagcttaactgacgtaagccataccctgtatgggcactggaataaattaaatgaaaagttatatgagaaagcggtggaggccatcggcgacatacaggtggcgaaaaatcggaagaaggtagaagcatatttaaacaaagatgcttatactttgtctgagctgagcttcggagatgatatttctttagcgcagtattttactagcattagcgcagcatcgggtgcaaccaatagcctgtgggttcagttccagagctggtgcaaaaccgctgagaaacctaagtatgttcataatgaagccggtacagagctggtaaaaatgttacttgatagcatcatgaacgtccttcacaaatgttctgccttagttgtcagcatggagaatgatctggataaagatttttataataagtttttacccctgtatgcggaactggaaaacgtaattctggtatacaatagagttcgtaatttcttaacacagaaaccctctagtaccggtaaaatcaaactgaaatttgatatacctagtctgggggctggatggggaatcaataaggagaaaaagaacaaagcaattctgctcttcaaagacggtcggtcttatttaggtatcatgaatgttaaaggtaccttggactttgacgataaagcagagccgggcgaacccacgtacaagaaaatggtgtgcgtgaaccacagcaaaccatacatggacctcccgaatagtttctttcggcagaccggcatagataaatataaaccgtctgaacgcattttaaaaatttacgaagcgtttaagaaggatagtaaatcggtggatattaaggaggttcgtggcttaattgattattacaaagaagccataacacgcaatgaagattggaactcagtatcatttacctactcgcctactgagacttatgaaaccattgatgacttctataaagaagttgcgaagcagtcatatcaagtgagcttcaaagatatttctcagaaactggttgatgaatgggtcgagaatgggcagttatacctcttccagctgtacaacaaagattatgcagagggtgcccacgggcggaaaaacttacacacgctctattgggaatctcttttcactgcagagaaccttagtgatattgtgattaaactggggagcaatgccgagttattttaccggccccaggcaataaaaaaaccggttaagcacgaagtcggcacaaaaatgctgaaccgtcgcgacaaatcaggaatgccgatccctgatgcaatatatttgtcactttatcagttttataacggtaagaaagaggaagcggaacttacagatgaggaacgtgcctatatttctcaggtaattgttaaagatgtccaacacgagataattaaagaccgccgttacaccaaacagtttcattatcagttccatgtgcctatcgtttttaatgcgaatgcaaatgggaaagtcaagttcaatgataaagttatggattatattcaagacaatcctgatgttaatatcattggtattgatcgcggagaaagacatctgatatatttaacgttaattaatcagcgaggagagatcctgaaacagaaaacctttaatgtagttggcaactataactatcaagagaaacttaaacaacgagaaaaagagcgtaaaaatgcacagaaatcatggcaggacatagagcgtattaaagatctgaaagagggcttcttatcggctgtagttcatgaaatcgcccaaatgatgattgaatataacgcgattgttgtattggaagacctgaatcgtggctttaaacgtggtcgttttaaagtggagcgacaagtctatcaaaaattcgaaaaaatgttgattgacaaactgaattatctgagtttcaaggatcgcgagattgcaaacgagggtggaattctgcggggataccagctgacagaaatgactctgaactactctgatataggccgtcagaccgggttcctgttctacatcccggcagcatatacgtccaaaatcgatcctgtaacaggatttgtaaatcactttaatcttaatgatatcacaaatgcagaaaaacgcaaagcatttctgatgaaaatggaaagaatggaaatgaaaaatggaaatgtggaattcgaatttgattaccgcaagtttaagacattccaaactgattaccaaaatgtttggacagtaaacacttccgggaaacgcatcatttttgacactgagacccgcaaagcgaaagatgtatatccgacaaaagaaatcgttcaagcatttgcgaatagaggtattgtgttggaggaaggcatggatctgaaagcaattattgccgaggttgagccggatagtaagaatgccgcttttttccgctccctgttttatgcctttgaaaatacattgcggatgagaaattcaaatgccgagacacaggaggattatattttgagtccagtcgcgattagcggtaaacaattttgcaccactgatgaagccaacaaaggtaaagatgccaatggtaattggctgtcgaaattgccggttgacgccgacgccaatggtgcatatcacattgcgctgaaagggctttatctgctgaacaatcctcaaacaaaaaaaattgagaatgaaaaatggtttcagtttatgattgagaaaccgtatatagaa

SEQ ID NO: 660 - DNA, 3732 bp, synthetic construct
  misc_feature 1..3732: note = Sequence codon optimized for E. coli expression
  source 1..3732: mol_type = other DNA
atgaaaacgttcaatgacctgaccgggctgtatagtctgtcgaagaccctgcgatttgaactgaaaccagttggcaaaaccaaagataatattgaaaccaaagggattatcgcgcaagacgaaaagcgcgcagaagaatacaaaaaggtcaaagacatcattgaccgttatcataaatcgttcatagacatgtgcctggctggactggtccttcgtaccacgagcgacgggaacaacgacagccttgaagattatgtcgcactggcgtccaaaagtaatcgtgacgagaaggaagagaaagattttgacgacgtgaaaacagcgttacgaaaacagattgttgatgcatttaagaaaggcaatagctattccgacctgtttaaaaaggagttaattttaaaccatctgcctgactttgttaccgatgaacaggaaaagcaaatggtagagaatttctcgaaatttaccacttattttacgggttttaatgaaaaccgcaaaaatatgtactcagacgaagagaaatccaccgcgatagcttatcgtctgatacatgaaaatcttccaatgtttatagacaacattaaatcttttgcgcgcattactgaacaagaggacattgatttcattgccgatatcgaacatagctttcgcgaagagttaaaaggacagtccataaccaaaatgtttagccttgaaaattttaccaatacgctgacgcagggtcaaatagaactttacaacaagattgtggggggacgagtggaagattctggcgcaaaaaaacaaggaatcaacgaacacgtaaacctgtataaccaaaaacataaagacgctcgcctgccgcttctgaaacctctgtataaaatgatcctgtcagaccgcgttgtactttcttggttacctgaagagtttgccacggacgaagagatgttagacgcaataaatgaaacacataacaacttaaaagatgttctggtcgatgttcgcgagcttctgcagaatatagacaactatgacacagagcatatttatatagcaaacgataaaggattgtctgatatctctcaacagatctttggccagtacgatgtttacactagcgcaatcaaggccgaactgagagatagcatcaccccaagtgctaaggagcgcaaagacccagaactgttagacaaaagaattaataacatttttaaagcatccaagtcttttagcatcgattatctgaactcccatgtagaactcgggaagactattcagtcttattatgctcaactgggagcttatgatcggaatggtgagcagcgtattaacctgctttcacagatcgacctggctcacgtggatgctcttgaagtcctgtccggcaaacatacaaatttgaatcagtcagaagaatcgataaaaaaaattaaagcgctgctcgacgcgtataaagcgctgcaacattttatcaaaccactgcttggtaatggagacgaagctgataaagacaatgaattcgatgctaagttacgcgcaatatggaatgagctggatataataacgcccctttacgacaaagttcgaaatcgcctgacgcggaaaccgtattcaaccgaaaaaatcaagctgaatttcgacaatgcacaattgcttaatggatgggatatgaataaagaacctgattgcacgtcagtcctgctcagaaaagacggtcagtactaccttgcaataatggataaaaaaagtaatcacgcatttgatactgatgatttgccttgtgatggcgagtgttatgagaaaatggagtataaacagatggctctcccaatgggcatgggggcatttgtaagaaagtgctttggtacggccaaagctctgggttggcagtgcccacggcacctgatgacctcggatggtaaaatcatcataaaagatgaagaagctcaaaaggtcttgccggagctgatcgactgttacaagtcttttctggacatttacgaaaaagatggcttcaagtataaaaccttttcttttaaatttaaaccgtcaagcgagtatgagaagttatcacactttttcgccgaagtgccttcacaaggctacaaatgtagcttccgcaatgtgagcgtcagctttattaatcaacttgtagacgaaggaaaactgtacctgtttcagatctggaataaggatttttctgagtacagcaaagggacacctaatatgcatacgttatattggaaaatgctttttgatgaacgtaatttagctaatgtcgtctataagctcaatggccaggctgaggtcttctacagaaaacgtagccttgacttagacaaaaccaccatccaccgcgctaaccagcctattgcgaataaaaatatgcagaacgaaaaacgtgaatcaactttctgctacgatatcgttaaaaaccgccgctatactgtggataaatttcagtttcatgtacccatcactataaattttaaagccacgggaggcgataatgtcaacgcgtcagtgctcgacgtcatccgtaataatggtatcgaacatatcattggaattgatcgaggcgaacgtcacctcctgtatttatccctgatagatatgaagggcaatattgtcaaacagatgaccttaaacgatataatcaacgagtacaaaggcaatacctatacgaataattataaagaattactgcaagcgcgtgaaggtgatcgcaaggaggctagacagaattggcagaagatcgaaaatattaaggagttgaaggaaggatacctgagccaggttgttcacgtaattactaaaatgatggttgagtacaaggcgattgtcgtgttagaggatttaaacgggggctttatgcgtggccgacagaaaatagagcgccaggtttatgagaaatttgagaagatgctgatagataaactcaactactatgtggataaacaaaaagatgccaatgaaaatgggggtttgttgcacgcctaccagcttgcttccaaatttgacactttcaaaaaacttgggaaacaatcagggtgtctcttttacattccggcttggaacacctcaaaaatagatcctgttaccggctttgtcaatatgttagatacccgctatgagaacgcggataaagccagaaactttttctctaaatttaaaagcatttcatataatgcagataagaattggtttgagttcgtaattggtgattatagcaagttcacggataaagcgaaggatactcgcacggattgggttctgtgcacatatggtacccggataaagacgttccgcaatccggaaaaactgaatcaatgggacaacaaggagattgtgttgactaatgagtttaaaaaagtgttcatggaagcaggcattgatattaacggcaacttaaaggaggcaatatgcaccctgaccgaaaagaaacatctggaatcattaatgcagctgatgaaacttctggtgcagatgagaaatagcgagaccaacagtgaggtagattatttgctcagtcctgtagccgacactgagggacacttttacgattctcgtaattgtggagataatctgcctaaagatgcggacgctaacggggcatacaatattgcgcgtaaaggattatgggccgtgatgaaaatcaaggctagtaagccgcaagagaaccttaagctgggtatctctaacaaagaatggctgcagttcgctcaagaaaaaccttacctgaacgac

SEQ ID NO: 661 - DNA, 3984 bp, synthetic construct
  misc_feature 1..3984: note = Sequence codon optimized for E. coli expression
  source 1..3984: mol_type = other DNA
atgaaaactattgacaaattttgtggtcaggcaaatggctatagcagaagtatcaccctccggaaccgcttgatcccgattggtaagacagaagaaaatattcagaaccagaacttactggataacgatataattcgtagccgggcgtatgtcgaagttaaaaagatgatcgatgactttcaccgtagtttcattgaagacgtacttagcaaaatcgaacttaagtgggatgatctctatcaccagttcgacctcttccagaatgagaaagataagcagaaaaaaacaataattaaaaaagaaatggagacgtgtcagggcgagatgcgtaagcagatagtgaagaaatttaaagatgatgaccgttttgataaactgtttaaaaaagatctgctgaccgaattcgtccccaccgttatcaaaaatgatgaactgggcacgatcagcgataaacagacggcccttaatgtctttaagggatttgccacatattttaccgggtttcatcagaaccgtcagaatatgtacagtgaaaaagcacaatcgaccgcgataagtaatcgtattgtgaatgagaattttcctaaattctatagtaatgttaaagtatttgagtatttacaggataattttccagagatcattagccagacagaacagtcgttgagtgtgctgctgaaaggaaaacgtttagctgacatctttacagaggatggctttaacgcggtgctgtcacaacgaggtatcgacttctataatacaattataggcggagtcgcaggagaggcaggcacccagaaattacaaggacttaatgaagaaataaacttggcaagacaacagctgcccatcgaagaaaaatataaactgaaatgtaaaatgtcggtgttatacaaacagatccttagtgatcgcagtactacgtcctttataccggctggttttgaaagcagcaacgaagtgtatgaatcaattaagcaatttaaagaattatccctgaacaccattatttcagaagcaaaaactctttttgaaaagtccgattacaaccttgaacatatctacgtcaccgctaagggtgtcacggaatttagtctgaaattatttggaaactggagtattctccatgatggacttttcctgatcgaaaaagatggtgctaaaaaaagcctgtcggagaaacagatcgagaccctgcgtagagaaattgcaaagcgcgactactcattatcggagctgcagaatgcttacgaaatgtgggcaaaagaaaatgatgttgctgtcgaaaagacagtcaaaaactattttaaaatagcggagctgcgcgcaaacgaaaaaacgaaggagaaatgctttgttgaaatcctcaaaaagattgaatcggcatttgagaaaatcgacttcgaaaaacaggaaaacctgattaaagaaaaggagagcgccacacctattaaagacttcctcgatgaagtacagaacttataccattacctcaagttagttgattatcgtggtgaagaacaaaaagatactgacttctattctaagtacgatgaaattttacaaactctgtccgagatagcgcccctgtataataaagtacgcaattttgtaacaaaaaagccgaacgaaatacgtaaaatcaaagtgatgtttgacagcagctctttcctgaatggttggggtacagagtacggtactaaggaggcacatatctttattgattctggtaaatactatttgggcattgttaataaaaaacttgataaaaaagatgtagaaagccttaaagcggatggtgaacatatggtgtcaaaggtgatctatgatttccagaagcccgacaataaaaatacgccgcgcctttttatacgaagcaaaggtgagtcgtttgccccggccgtttccaaatacaacctgcccataaccgatattattgacgtgtatgataaagggctgttcaagacagaatatcgaaaaatcaatccggaagaatacaagaaagcactggaaaagctgatagattactttaagcttggcttttctcgccatgactcatataaacactacaactttagttggaagaaaaccagcgactacgcagatatagccgacttttatactgacaccatcaaatcgtgttaccaactgaagttcgaaaaagtaaactttgattgccttcttaatttatccaattctggtaaactgtttctgttccaaatttataacaaagactatagcaccggcaaggacggtggtaatggctcaactggaaagaaaaacttacacactttatattgggaaaatctgttttcagaagaaaatcttcgaaatgtgtgtctgatgttaaatgggaaagccgagttgttttggcgtgatgcaaatccaaatgttaaggccgtttgtcacaagaaaggatccatactgattaatcgcacaactagtgatggagaaacaatacccgaagaaacataccaggagatatataagtataagaacccggataaacaggagaaagatttcaaattgtcagatgcggctaaagagctgttagatagcggcaaggtagtgttcaaagatgcaaaatttgatatcatcaaggatcatcattttacccagaaaacgtacttattccattgtccaattaccatgaactttaaggcccctgaaataaaaagaaagtttaatgaaaacgtgcaacaagtgcttaaaaataatccagatattaaaattatcgggctggatcgaggtgagcgtcatttgatatacttaagcctgatcaatcagaaaggcgagattgagcttcagaaaacgctgaatctcgttgagcaggttagaaatgataagaccgttagcgttaattatcaagagaagcttgtgcaaaaggagggcgagcgtgataaggttagaaaaaactggcaaattattagcaatattaaagaactgaaagagggatacctgagtaatattgtccacgaaattgccaaattaatggttgataataatgcgatcgtcgttatggaagatttgaatctggggttcaagcggggccgatttgctgtggagcggcaagtgtatcaaaagtttgaaaatatgctgatagagaaactgaactatcttgtgtttaaagacaaagaaaacacagagccgggaggagtacttaacgcctatcaattgactgataaaactgccaatgtgtcggatattggtaagcagtgcggttggatcttttacattccggcggcttacacatcgaaaatagatccgaaaactggttttgccaacctgttttataccgccggcattaacaacattgaaaagaaaaaggcttttttcgataagtttgactcaattcgttatgatcgtaaaactgattcttttatcttttcgtttgactatagcaagttcggggataatacggacttttacaaaaaatgggaagtgtattccaagggtgaacgctttgtttttgataaaccggatcactggaaatcatataaaaaaattgaaactagcagtaagaagtctgaaaaagcggtaatttgcgtgaaccctactgaggagctcaaagtgctgtttgataaacaggatatcaactggaactctgaaaaaaattttatcgatttaattcacaccgttcagggtaaacgagaaaattgtgtgttctacgacggcttatatcgaagttttacggcaatcctgcaaatgagaaactctaatgctaaaaccggcgaggactacattatttctccagtgatggcagacgatggcaccttttttgactctagagaagagttcaaaaagggagaagggagcaaattgcccgtcgatgctgacgctaatggtgcttatcacatagctcttaaaggtctgtctcttctcaaacgctttgatgttgccagcgaggctgaattgaaaaagtttgatatgaaaataagtaacgccgattggtttaagtttgcgcaggagaaatcttatgcaaaa

SEQ ID NO: 662 - DNA, 3672 bp, synthetic construct
  misc_feature 1..3672: note = Sequence codon optimized for E. coli expression
  source 1..3672: mol_type = other DNA
atgaaaaagattgataactttgttggttgttacccggtttctaagaccctccgcttcaaagcaattcctataggcaagacgcaagagaatatcgagaaaaaacggctcgttgaagaggatgaagtgcgtgcaaaggattataaagccgtgaaaaaattaatcgaccggtaccacagagaattcatcgaaggcgttctggataatgttaagctggatggattagaagaatattatatgctctttaacaaatcagatcgagaagagtcggataataaaaagatcgagattatggaggagcgcttccgcagagtaatctctaaaagttttaaaaataatgaggagtacaagaaaatattctccaagaaaatcatagaggagatacttccgaactacatcaaagacgaagaggagaaagaattggtcaagggatttaagggcttttataccgctttcgtcggctatgcccagaatcgtgagaatatgtactcggacgaaaagaagtcaactgccatctcatatcgcattgtcaatgaaaacatgccacggttcataaccaatattaaggtcttcgagaaagcaaaatctattttagacgtagataaaattaatgagataaacgaatacattttaaataacgattattacgtcgatgatttttttaatattgatttctttaattacgtacttaatcagaagggaattgatatctataacgccataataggaggaatagttacaggcgacggacgcaagatccagggtcttaatgaatgtatcaacctgtataatcaggagaataagaaaatacgtttgccgcagtttaaacctctgtacaagcaaatcctgtctgaaagcgaatccatgagtttctatattgatgagatcgaaagtgatgacatgctgattgatatgttaaaggagagtctgcagattgatagtactattaataatgcaatagatgatttaaaagttctgtttaacaatatctttgattatgacttgtctgggatttttatcaacaacggattaccaataacaactatttctaatgatgtgtatgggcagtggtctacaattagtgatggttggaatgaacgttacgatgttctgtcaaatgccaaagataaagaaagtgaaaaatatttcgaaaaacggagaaaagagtataagaaagtgaaatcgttctcgatcagcgatctgcaggagctggggggtaaagatcttagcatttgcaaaaaaataaatgaaataatatctgaaatgatcgatgactataaatccaagattgaagagatccaatatctctttgacatcaaggagttagagaaaccactcgtgacagatctcaacaagattgaattaataaaaaattctcttgacggactgaaacggattgagcgctatgtaattcctttcttaggcactggaaaagagcaaaaccgcgacgaggtgttttacggctatttcatcaaatgcatcgacgccattaaagagatcgatggtgtatacaataaaactcgtaattacttaactaaaaaaccttattccaaggacaagttcaaattgtattttgagaacccacagctgatggggggttgggaccgcaacaaggaaagcgactatcgttccacattactgcgtaaaaatggtaagtattatgtcgccattattgacaagtctagcagtaattgcatgatgaatatcgaggaagatgaaaatgacaattatgaaaaaattaactataaactgctgccaggtccgaacaaaatgctgcctaaagtgttcttttccaagaaaaatcgtgaatattttgcgccgtcgaaagaaatagaacgcatttactctacaggtacgtttaaaaaagatacaaacttcgttaaaaaagattgcgaaaatctgataacattttataaagactcgttagaccgtcatgaagattggagcaagtcttttgattttagctttaaagaatcgtcagcctatcgggacatttcggaattttatcgcgatgtagagaagcaggggtatcgggtatcattcgacctgttaagctcaaacgccgtaaatacactggtcgaagaaggcaagctgtatttatttcaactgtataataaagacttctctgaaaaaagccatgggattcccaatctgcatacgatgtatttccgcagtctcttcgatgataacaataagggtaatattcgcctgaatggcggagcagagatgttcatgcgacgtgcgtccctgaacaaacaggacgtaaccgtccataaggcgaatcagccgatcaagaacaaaaatctgcttaatccaaaaaagaccacaacacttccgtacgacgtatataaggataaacgtttcactgaagaccaatacgaagtgcatattccgattactatgaataaagtccctaacaatccgtataagatcaatcacatggttcgtgaacaattagtcaaagacgacaatccctatgtaatcggcatcgaccgaggtgaacgtaatcttatttatgtagttgtagtggacggccagggtcacattgttgaacagttaagcctcaatgaaattattaacgagaataatgggatttcgattcggacggattatcatacgttgttagatgctaaagaacgtgaacgtgatgagtctagaaaacagtggaaacaaattgaaaacataaaggaattaaaagagggttatatttctcaagttgtccataaaatctgtgaactggtggagaagtacgatgcagtgattgcgctggaggatctgaacagtggttttaaaaattcccgggtaaaagtggagaagcaggtatatcagaaatttgaaaaaatgttgataacaaaactgaactatatggtagataagaagaaagattataacaaaccgggtggtgtattaaacggttatcaactcactacccagtttgagagcttctcaaaaatggggacacaaaacggcataatgttctacatacctgcatggttgacctctaagatggatcctactaccggcttcgtcgatctgttaaaacccaaatataagaacaaagccgatgcacagaaatttttttctcagttcgattcgatcagatacgacaaccaagaagacgcatttgtattcaaagtgaattatacgaaatttccccgaacagatgccgattataataaggagtgggaaatctacactaatggcgaacgcattagagtgtttcggaacccgaaaaaaaacaatgaatacgactatgaaactgtcaacgtatcagagcgcatgaaagaactgttcgactcctatgatttgttatatgataaaggtgaactgaaagaaactatctgtgaaatggaggagagcaaattttttgaggagctgatcaagctctttcgtctgacacttcagatgcgcaatagtatcagtggccgtacggatgtagattatttgatatccccagttaagaattctaacgggtacttttataattctaacgattacaaaaaggaaggcgcaaaatacccgaaagacgccgatgccaatggcgcatacaacattgctagaaaagtgctgtgggctattgaacaatttaaaatggcagatgaagataaactggacaaaacgaaaatttccattaagaaccaggaatggcttgaatatgcccagacccattgtgag

SEQ ID NO: 663 - DNA, 4002 bp, synthetic construct
  misc_feature 1..4002: note = Sequence codon optimized for E. coli expression
  source 1..4002: mol_type = other DNA
atggaacactctctccgtgatttcaccggtctttactccctttctgaaacgctgtcttttgaattacgacctttagactcggaatttaatcctaagcctgctgaccgagccttagccgacatgaagaaatatttggacgaggatcgcaaacgcgctgctcaatatgctagcataaaagctatactcgacgaagaacacaaaaagctgattgaacgcgtgttatctgacgtgcctggtgccattggccgcttaaaaaaccgtaaagcattcgcagaaattctctcggacgatggtagcggcattcgctggtctcgactgaaagaagcggaaggggcggcacgcaatgccaaaaccgagatacgtgaagccaaaaagactcgcaaagccaccagtgaagcggatggagccattacaacggaaacgaaggaagaggcccgtttcaaagatctgcagaaaaaattccgtgagctgatcgccgccctgttagacacagatgaaaaaaagaaatctctgttggaggcgacgcctagcaagtatattaaaggtatgcttagcgagtttggggatgcgttacagccggatactcgtgaagccttaaacaccttcgaaaaattcgcttgttacttaaagggttttcaagaaaaccgtgcgaatctgtatgctgctgagccgcaagtgactgcggttgccaaccgcgttgtgaaccagaattttccgaaatttctgacagcctgccgcattatggcgcatattcaagaacgttatccagagattatttctgaagcggaacgaaaccttgcagctaaccttaatggggccccgttgatgtcacgctttcagccggatgcatttgatctgtgccttgcgcagtcgggcatagatgtgtacaacacaatacttgggggttttaccttaaaagatggcaccaagattcaaggtatcaatgagactatcaatttatatagacagcaacatgccgatgcagcgaacgatagaaatctcgctcccattccggcgctttataagcagatcctttcagatcgcgatacgctcagtttcataccggagatgtttgattccgatcgagctgtttgtgattcaattctgaaattcttggaatctctgaaatgggaaactatgcaaagtgatattacatcactgctggattccttagatgcggatgaccctggcgtttttgtcgaaaaaagcgagttgacacgtatatcccataaactcttcggtgattggtcgcgcattcgtgcagccctggaacggtgtgcagaaacaaaattcactcgtaaagcggatcgcgaaaaatggttgaacaaagatatatactcgcttcgtgagcttaacgaattagattttaaattatcagaagaagatgatattgcagaagtgcctgccattacagacttttggcggggggcccatcgcgccgaagtgtttagtgctgtcgagtcggccattcaggcagttttagatacgcttcacagcgaggcttatccagaaggtgatactgaaccgcgcctgcgtgaaaacgagaatgatgtcgctgcaattaaggatctgctggatgcacttaccggcttgcttcacctgctgaaacctctgcaggcggaatcaccggacgccaatatggtattctatgccgattttaatgatttttacgcacgcttagacccggtaatacccttgtacaatcgtgtccgtaattacataacccaaaaaccaagtgaacagaagaaggttaaactgatgtttaattgctcaaccttggctgatggatgggatcgtaataaagaaagtgataataacgccgtaatcctgttaaaagacgggaactattacctggcagttatccagccagcgcaaaaacagaccgacggcaaacgtgagcgcaaagtgaaattcgccgatttcgaaacagacggcgccgggccttgttttcgtaagatggtatataaatatttaccggggccaaataaaatgctgccgaaagtcatcttttcaaaatctaatcgtgatatttttgatccaccagcagaattattaagaaaatatgaggccggcatgcataaaaagacttccccgaatttcgatctgaaattttgccgcgaattgatcgatttctttaaagtttgtatcgcgaagcatgaggattggtcaaaatttggttttcagttcgcggatactgcaaaatataacggtattgacgaattttacaacgagatcagcgcccagggatacaaaatgacttttgcccccattccagtgcaaaccgtttccgatctgatccgagacaacaaaattctgttgttccagatatacaataaagatttcgccccagggtccacaggtcgccaaaataaatttaccctgtactggaaaaccctgtttgaggaggagaatctgaaagatgtagtcttcaaattaaacggcgaagctgaattgtttcttcgcgatccttcggtgcggaaaccttttgttcatagaaaaggtgataagcttgttaatagaacaacaaaagacggtgctccggtttcagaatcggtgcatgcagaactttgtaagtttgccaatggccgcattggctatgatggtctcagtgcggaagctagagggatttgggacaatggccaagcggttgtgaaaaccgccacgcatgacattaccaaagaccggagatttacgacgccaaaattcctgttccacgtgcctataagtattaattttaaagccccggatgcgaaagcgggtataaatcagaaagtgctcgattatcttcgtgacaaccctggcgtgaaggtcatcgggattgatcgtggtgaacgcaatctggtctatctcagtttgataggccgcaacggtcggatacttttacagaaatcttttaatactgtaccgcaacgacgttccgaccgaacagtggaatttgattaccacgccaaacttgaccagcgcgagaaagagcgggacgccgcgagaaaaaattggacctctgttaatcgcataaaggatctgaaagccggatatttaagccagattgtgcatgagatcgccaaacttatggtggaacataatgcagtagtcgtgatggaggatctcaactttggtttcaaaagagggcgcttcgcaatagagaaacaggtctaccagaacttcgaacgcgcgcttataaccaagctgaattatctggtgtttaaagacgctgaaacgcctgcggacgcagggtatgttctgaagggtttacagttagccaataaattcgaatcgtttgaaaagttagggaaacagagcggctttttgttttatgttcctgccggttatacaagcaaaatcgacccagcaactggattcgtgagcttgtttcaatttggcaagtatacaagtgctgaagcgcgcaaggcctttttgggcaaattccgttcgattcgttttgatgccgcgagagatgcgtttgccttcactttcgattaccgcgatttcccggcccaaggaaaagagttaccggggaagtctgaatggactgtccgctcagttggcgaacgtatcgtgtacagtccaaaaaaacgtgagtcattcgtgtgcaaaccaaccgagattattctcgatgcgctggcgaaacgcggtatccggccggaagatggctttgatctgctgcgattaattagagagaccgacggcgcggatcgtgccaatgcagcgttttttaacgccgtgttcgaggcatttaaactgactgtgcagatgcgcaactctgacgcaaagattggtgaagattatatccttagtcccgttatgagcgcggatgggacgttttttgatagtcgcaaagccccagcagacatgccacgagacgccgacgcgaacggggcctatcatattgcgatgaagggactttatctgttgcaaaatcggttcacagccggtaccaagaaagccgatctgaaaatatcgaaccaggattggtttgattttattcaaaatcggcatgcccgc

SEQ ID NO: 664 - DNA, 3738 bp, synthetic construct
  misc_feature 1..3738: note = Sequence codon optimized for E. coli expression
  source 1..3738: mol_type = other DNA
atgaagcagttcaccaatctctatcctgtgtcgaagactttacgtttcgaacttcaaccggtcggaaaaactaaagagaatatcgagaaaaatgggattctgctgagagatgaacaacgagctgaggactataaacgggttaaattattgattgatgagtaccacaaacagttcataaaacaacgcctttggaattttaagctgccaatgattaacaacggtcaccacgactctcttgaagaataccaggctctgtatgaactttctaaaagagatgatgatcaagaggcaacgtttactgaggttaaagacaatcttcggtctatcattgctaaacaactgacggtgggttccacctatgaacgtatctttaaaaaggagttggtacgcgaagatctgatagaattccttgaagacgagaaagacaaagaaatcgtccgtcagttcgcagactttacgacctatttttctggtttccacgagaaccgcaaaaacatgtattctgctgaagagaaaagcaccgcgatcgcgtatcgccttatccatcagaatctgccgaaattcatggacaacatgaaagcttttgccaagatcaaacagacatcagtcgcagagcattttacagatatctatgaagggtggaaggaatatctgaatgtggaatctctggaagaaatttttagcctggattacttttcagaaactttaacccagccgcacattgaggtttacaattacatcattggaaagaagattctggacgatggtactgaaataaagggtataaatgaatatgtaaacctgtacaatcagcaacaaaaagacaaaagtcagcgccttccctttctggttcctttgtataaacaaattttatcagatcgcgagaaattatcgtggttaagcgaagaatttgattctgatgagaaaatgttggcggcaataaaagagtcttataatcagctgcatgacttactgatgggtgaagaaaatgaatctctgcgttccctgcttagccacataaaagactacgacctgactcagataaacatcaccaatgatttatcactgacagagataagccaacatctgttcggccattacgacgtttttagtaatggcatcaaggatcagctccgtattattaccccgcgcaaaaaaaaagaatctgatgaaaattttgaggatcgaattagtaaaatttttaaaacccagaagtcttttagtatcgattttctggacaaattgccccagccaatcatggaagatggaaagccacggtgcatcgaagactacttcatggctctcggtgccatcaacacgaacacgacgcagaaggaaaatttgtttgcacagattgaaaatgcttacgaagatgcaagagcaattctgcagatgaaagagacgggggacacactgtcgcagaacaaatcagcggtggcgaaaatcaaagcgttgttagacacactgaaagatttgcagcattttattaaaccgctgcttggctcgggtgaagagcaggagaaagacgaacttttttatggctcctttcagatgatgtgggatgaactggacgcaatcacgccgctgtataataaagttcgaaattggctgactcgaaaaccatttagcacagagaaaataaaattgaacttcgataatgcccaactcttagcgggctgggatctgaacaaagaaattgacaatacctgtacaatactccgcaaagatggactctatttcttggccattattaacaaacagcacaatcgcgtactgaccacagataacttaattagcgatggggattgttatgaaaaaatggtgtataaacagctgggacagatttcgcagcaactcccgcgaattgcattcagcaatagttggcagcagaaaatcaccataccggccgacgtaatgcgcattaaaaaaacaggcagttttaagacgaacaacgatgacttgcagaagcttattgcattttataaatattttatatcgcagcacaaagaatggaatagctttttcaatattcgttttactgaaagagataattataaaaacctgccagatttctatagtgaagtggatacattgttttacagtctgtctttcttaaaagtttcagttgattatattaatcaacttgtggatgaaggcaagctgtatttgtttcgtatttggaataaagatttctctgaatttagcaaaggtactccgaatctgcatacattatattggaagatgttgtttgatgaacgcaacctggcagacgtggtgtataaactgaatggccaggccgaggtgttttatcgtaaagtaagcattaagccggaaaatcgtattgtgcatcaggcacaccgcccaatcaccaacaagaacgaattgaacgaaaaacgcacgtcaacattcgaatacgatattatcaaagacagacggtacactgtagataaatttcagttccatgtaccgatcacgataaattttaaagcaaaaggccagaataacattaacccgatagtgcaggagacaattagacaagatggttttaaacacataattggcattgaccgcggagaacgccatttattatacctgagtttaattgatctgaatgggaacatagttaaacaaatgacactgaacgatatcataaacgaatacaaagggcagacgtataaaacgaattatcatcatctcttagctaagagagagggagaacgtactgacgcgcggcgctcatgggataccatcgaaacaatcaaggaactgaaagaagggtacctgtctcaagtgattcatataataagtaagatgatggtagaatattctgcaatagtagtgctggaagatttgaatattgggtttatgagaggtcgccagaaaattgaacgccaagtgtatgaaaaatttgagaaaatgctgatagataaactgaattgctttattgacaaacagattgcgcctcaggaagttgggggcatgctccatcccatccagctcacgaataagtttgaaagtttcggcaaattaggtaagcagagtggttgcctgttctatattcctgcctggaatacaagcaaaatagacccagtcacaggatttgtgaacctgttcgatacccactatgaaacccgtgaaaaagctcgtttatttttttccaagttccagagaatcaacttcaatgaagaaaaaggttggttcgaattcgcttttgactataatgactttaccacgaaagcagaaggtacacgtacgcagtggacgttatgcacatatggggagcgcattcggacttttcgaaatccagataacaaccatcaatgggatgatgagcgtatcgaactcacagaggaatttaagcagttatttgaaaagtacgatatcaacatccgtggtaacctgaaggaggcgataagcaatcagagtgatgcccaattctaccgtgatcttttagggctcatgaaacttttgctccagatgcgtaattcaataacgaatagtgaggaagattacctgttgtccccggtagcggacgaaaatggtcactttttcgattcacgtgaagagattgaatctcttcctaacaatgccgatgccaatggtgcttataatattgctcgtaaagggctgtggattatggagcaaatcaaaaaaacggataatctcgccaagctgaaattgacgatatcgaataaagagtggctgcattttgcgcagaataaaccttacctgaatgag

SEQ ID NO: 665 - DNA, 3825 bp, synthetic construct
  misc_feature 1..3825: note = Sequence codon optimized for E. coli expression
  source 1..3825: mol_type = other DNA
atgaaaaaggaaaacatattcgagaattttacccaccaatacagcctgtcgaaaaccctgcgatttgaacttatacctacagaggaaactaaacgtttccttgaaaaaaatgaaattatcaagaaagacgcggtaatcgacgaaagttatcataaagccaaaccgtatttcgattcccttcatcgggaatttattaaggaatcgttagaccctgagcgcagcctgctgtcatttggtaatttcgaacgctcctggaatgattttcagaaggacaagaaatcaaacaagaaaaatttgttggcccagaaaaaacttctgtataaggatatcgcgaaactgtttgacgattatgttaatacatggaagaaacagtatgcaccagaaactaagaactcaggtacgaagctgctgtattcagccgataccctgagtattcttaaaaagcggtttccaaaggattctgaaaatgaaaaattattcataaaggacgaacacgggaacgaccgctatatttttgattcttttgatcgctttacgacctatcttactaagtttcaggccacgcgggaaaacctgtataaaaacgatggcacgagcacggctgttgcaacgcgtatcgtggagaatctgtctttctttttggcaaataagagcaaattcgaaaaatttcttgcatataaagatattctcaaacttacagaccaagagaaagaaagtagtaagacagaatactacatgcgctgcatgacgcagcccggtattgagaagtacaatgctctggtgggcgatcttaatgcacgcatgaaaactcttcgcgacactgccggaaaagacgcaaaaaaatcggattacccgttgctgaaaaaactgtataatcaaatactggccgaaaaaaagattgaatccgataaagtcttcgacatcgaatcgaacgaagaagtcccggtgcggatgcatgaattttatgaggaagttgagcgcgtatctaccatcgccaaggaacttgttacgattctggcccagggcggtttcgaaaatgagtacggaggcatttacctccataatcgagctataaatactattgcgcgcaagtggttcgttagcgcttacgaattcgaaaattgcttgccgcagaaaggcaagaaaaaagaaggatcggttcgagtcgccccgtttgtctcctttgccgaaatcaaagatgctcttggtgaaaagctggcagaagatctgctgaaagaaaaactgttcgaggagaaagcttatcgcctcgtaaagcgtacgctggcatattcccagttccttgccctgtttgcgaaagatctggaaatcttacttaatgaatataatgagaaaaaaaataacttctctaagaaggaccttcgtatttttgagcgcggcgagaacgatgagaatgttgatgcgttgaaagatgccctcgatgctggcctgcatattgtacagtttatgaaatattttgtactgtcatctaaaaaagcagatgacaagccaactcacacgtcggccgaattctacaatcattatgacgagttatatggggatccggatcagaaacatgatattgttcgctattatgatgcgtttcgcaactttctgactaaaaagcctgcagatcagaaaaaaatcaaacttaattttgagaatggcgcgcttctgactggattcgacaaagacaaggagagtgagaaactgggtatcatactgcgtaaaaatagtatttactatcttggtattatcaacaaagagcataataaaattttcgacgataagaaacaccaggatgcgtttgacgtggttgatgccaccagctatgaaaaaatggaatataaattgtttcccgacccaaagcgtatggtgcctaaaatcgcttttgcgaagaaaaaccgcgaacgtttcgggtggacccaagaaattcaggatatcaaagacgagtacgcacggttccaagatgatcgaggtgatcgtagcaactggagtaaacaattcgataaaataaaacttactaaattgatcgcttattatcagcatgctctcgaccgtggtggttacaaaaatacgtttgattttcaatggaacaacccggttgactattcggggatcggagaattcaatgatcatttgacctctcaaaattataaaattggctttcgccaggtcagacagagatacatagatgacaaagtagcccagggtgaattgtacttgtttaaaattcacaataaagattttggagagaaatctaaagggacacaaaacacccacacgttatactttctgaatttattctctcagcacaatctgactcacatcaaattgcgtctggctgggaatgccgaagttttctatcgtaaatccagcacccagcgcaaagaggaacaaagaaagttcattcgaccgattgttaaaaataaacgttttaccgaagacaaatatttcttccatattccgattaaaatcggggcgagtgttaacagtattagtgagacgaaattcaatcgtaccctcaatgagaagctgcgccaatccgcctgcctgattatcggtattgatcgtggggaaaaacacctggcatattattcagttatcaatcagaagggtgagatcgtggatcaggcgagtctgaacaaaattaatgacgttgactactgcgagaaactgcgaacgcgcgaaaaagagcggctggaacagagaaagtcgtggaaagcgataagccagatcaaagatttaaaacggggttatatctctcaggtcatccacaagttatctgaactggtgatcaaacacaatgccatcatcgtttttgaagacttaaacatgcgttttaaagaagtccggggcggtattgaacggtctgcctaccagcaactggaaaaggcactgattgaaaaatttgggtacttagtttttaaagataaggatccgttggaagccggcggcgtattgaatggttatcaattgagcgccccttttgaatcctttgaaaaaatggggaaacaaaatggggtaattttttatacaaatccggaatacacctcaaccaccgatccagtgacaggttggcgtcaacatatttatatcaaatcagatgccacggacaacgaagccttgaaagtgtttaccgagaaaatcggtataggctggagtgacgacaaacaaagctataccttttcttatgatcaaaaggatttctgggaggattctccggcgcgtaaatgggtactgtacgcaaatgcacctcgtcttgagcgctatcgtaacgatgccggctattggaccacccgtgaaaccaattccaatgatttgttacgtgagttattcgaagtttgggattttgatcaaccggaaggcgatatcagtgagcagatagccatgatgtatgaagagggcaaattaaagggagaaaagatcatttctgaaaagtcgcagcggttctttaaagctctgagatacgcgctgaacttaacgcaacagattagaaatagcgattctatccgttacgtctatgagcgcgatgcacagggtgatattgttgaagattctcaaggtaaaatggtcgtaaaagaaataggtgaaaacgttgattttattgccagcccggttgttcctttctttactactccgaatccatataccaaggaaaatttatgcggacttgtgatcgaaaatggcgacgcaaacggtgcgtacaatattgctcgtaagggcatcatgatgctggaacgtattaaacagacccaggcaaatccggatctgtatatctccaaatccgattgggatgaatggcttatgaaggatataaaacagaaa

SEQ ID NO: 666 - DNA, 3771 bp, synthetic construct
  misc_feature 1..3771: note = Sequence codon optimized for E. coli expression
  source 1..3771: mol_type = other DNA
atgaatgatctgaaaacttttattggcatttatccggtgagtaaaactttaagatttgaattacgccctatcgggaaaactcaggagtggatagaaaaaaataaggttttagagtcagacgaacagaaaagcgctgattatcccaaagtaaaggccttaattgatgaatatcataaggtgtgcatccacgaaagtctgaaagacgtaagtttcgattgggccccacttaaaaacgcactgggtgaatatcagaaagaaaaaagtgatgaaagtaagagcgtattagatcgcgaacagacgaatatgcgaaaaaaagttgctgctgcgataaagtcctttcaacactacgaacaactgaccgcacccaccccacagaaattaattgatgatgtttttccggggcgttatgaatccgaagctttaaaatcatttaaacgttttgcgatttattttagaggcttccaggaaaatcgcaacaatatttacagcgcggacgctattagcaccggagtgccatatcgtctggtacatgaaaatttcccaaaattcataaccaatattgaagtatacaacaacatcaaggcaaattgcccggaagttattgaacaggtcgaaaccgaactgcagccattcttgaaagaaattcgcatcgaaagcattttcaacttagattattataactccttactgacccaggacgggatagatttttataatcaagtactgggcggagttgcagaagaagggaaacagaagtaccgcggcattaacgaattctctaatttatatcgtcaacagcatccagagatggcgggtaaaaaaaaagcattaaccatgattccattattcaaacagattctgtccgatcgcgaaaccctgagctatatcccacagcaaattgaatctgaaagacagctggtaagtatgttgaagcagtttcacagccacatactgaattatgaatataacggtaattcggtgaacgtcttacgtgctttgagtagaatgatttcgaaagtcgacgaatacaatccggagggaatatatatcgccgctaaagctttaaccgacatatcacaagttctctatggtaaatggtctgtactgtcagacaaactgtacgattcggcagtcaaaaaatatggcgaacccagcaccgcgaaaaataaaaaaaaaatagacgcatacgtttcgaaagaagcttattcgctgtccgaagttgggctgatcggtgacgttggcttatctagctatttttcctcagtttcgcaatccattgaacaggtagatgaaaaatgggctcgctttattcgatggtgcgataatgacgaagagcagctgttcctgaataatcccgaaggcacagagctggtacgtgcccttctcgactcatatatggacatattacaccggtgtggtgtcctggttgtttcggtggaaaacgatctggataaagatttttataacgatttttttccgatctatgccgagttggaaaacgttataattatttataatcgcgtacggaattacctcaccatgaagccttacgacaccaaacaattcaagctgaattttggtgtcccgaccttgggggatggctgggaccagaataaagaaaaggataacaaaactatccttctgttcaagggcggactgtcatatttggggataatgaacccctacaacacacctaagattaaggaatgcaaagtcgatagcgaggatacatattctaaaatggtatataaactgctgccggggccaaataagatgttgccaaaagtatttttctcaaaaaaaggccttcagtcattttctccttcagaacatattcaggaaatttaccgtaacggaagttttaaaaaaggaagcccggattttaaccacgaacgtttacatgaacttattgatttttacaaagactctatttcaaaacacccagactggtccaaattcgactttaagttctcaccaaccaaaagctacgaagacataagtgccttttatgacgaaattagcaagcaggggtataaaatacaatttattaatatttcagagcagcaggtcaatgagtgggttgctaatggtcagctctatttatttcagttatataataaagattatgcagaaggtgcgcatggtcgtaagaatctgcacacattgtactgggaaaatttgtttacgccggagaaccttaataatctggttctgaaattgaatggccaggccgagctgttttacagacccagctcgatcaaaacacctgtgaagcatgtagtgggtagtaaaatgctgaacagacgcgacaaaagtggtatgccgattcccgaaactgtttataagagcttgtaccagtattttaatgggaaaaaattaaagtccgagctcactgcggatgagatagcgtatatcgaccagatagttgtgaaagacgtaactcacgaaatcattaaggaccgtagatatactaagcccgaatattttttccatgtcccgattacatttaatgctaatgctgagggcaacgaatacataaacgaaaaggtgcttgattacattaaagataaccctgacgttaacattatcggaattgatcgtggtgaacgccatttgatttatctgacgttaatcaatcaacgcggcgaaattctgaaacagaagacctttaaccttgtcggcaattacaattatcatgcgaagcttgaacagcgggagaaggagcgcgacgctgctcgcaaatcctggcagagtattgggaaaataaaagatcttaaagaagggttcttaagtgcagtaatccacgaaatcgccgtcatgatgatcgaaaacaacgccattgttgttcttgaggatttgaattcgggatttaaacgcggtcggtttaaggtcgagcgccaggtctaccaaaaatttgagaaaatgcttatcgataaactgaactatctgtctttcaaagactgtaaagccgatgaagtaggcggcattctgcgcgggtaccagttggcccagaagtttacttcgtttcagaaactgggtaaacagagcggattcttattctatatccctgcagcttatacgtctaagatagatccggttaccggtttcgttaatcattttaacttcaacgatgtgacgaacgcagaaaaacgaaaaagtttctttatgaatatgaatcgtatcgaaatgaagaacggtgatatcgaattcgagtttgattaccgtaaatttaaaacttaccaaagcgattatcgaaatgtgtggaccgttaatacctccggtaaaagaattgtgttcgacgcagaaaagcgtcaatctaaggactattacccgacaaaggaaatcgtcgcagcatttaaagataaagatataatcctgaaggacggtatgaatgttaaatcattgattgcaaatattgaggcgaacgcacggaatgcttcattcttcggatctttgttttatgcttttcaaaaaacgctccagatgcgcaacagcaacgctacaacggaagaagactatattctgtcccccgttgttcataacggtaaacaattctgcaccatagatgaagtcaataaaggtaagaatgcggagggtaactggatctcaaaactgcctgtcgatgctgatgctaacggagcctatcatatagcccttaaaggcctgtatttactgatgaacccgcaaacgaaaaaaatcgagaatgaaaagtggtttaagtttatggtggagaagccgtatatcgaactgaaaaacatcgacaactttgtt

SEQ ID NO: 667 - DNA, 3783 bp, synthetic construct
  misc_feature 1..3783: note = Sequence codon optimized for E. coli expression
  source 1..3783: mol_type = other DNA
atgaatacgtctttgttttcttcattcacccggcagtatcccgtcactaagactttgcgtttcgagctgaagccaatgggtgccacgttaggacacattcagcagaagggattcttgcataaagatgaggaacttgccaaaatttataaaaagattaaagaactgctggacgaatatcatcgtgcttttatcgcagatacccttggagatgcgcagctggtaggtttagacgatttttatgctgattatcaggcattgaaacaggatagtaagaacagtcatttgaaagataaactgacgaaaacacaggacaatctgcggaaacaaattaccaaaaatttcgagaaaactccccagcttaaagaacgttacaaacgtctttttacaaaagaactgttcaaagcaggtaaagataaaggtgatctggaaaagtggcttattaatcacgattctgagccgaataaagccgaaaaaatttcttggatccaccaattcgaaaattttacgacatattttcaggggttttatgaaaatcgaaaaaacatgtacagcgacgaggtcaagcacaccgcgatagcttaccgtttaattcatgaaaatttaccccgctttgttgacaacatccaagttctgtccaagataaaaagtgattatccagatttatatcatgaactcaatcatctggattcccgtacaatcgactttgcggatttcaaattcgatgatatgttacaaatggacttctaccatcacctgctgatacagtcaggtattaccgcatataatactttattaggtgggaaagtgcttgaaggtgggaaaaaattacagggaatcaatgaactgataaacctctacggtcagaaacataaaatcaagattgcaaagttgaaaccattgcacaagcaaatcttgtcagacggacaatcggtgtcttttctgccgaaaaaatttgataatgattatgaactctgtcagaccgtaaaccacttctacagagaatatgttgcaattttcgatgagctcgtagttttatttcagaaattctatgattatgataaagacaacatctatattaaccatcaacagttgaatcaacttagccatgaactctttgcggattttagactgttaagtcgagccctggatttttactattgtcagattatagatggggatttcaataataaaatcaataatgcgaaaagccagaatgccaaagaaaaattactgaaagagaaggaaagatacacaaaatcaaatcattccatcaacgaattacagaaggcaattaaccactatgcctctcatcacgaagacacggaagtaaaggtgataagcgactatttttccgcgaccaatattcgcaacatgattgacggtatccatcaccacttctctaccattaaaggttttttggagaaagataacaatcaaggtgaatcatacctgccgaaacagaaaaacagtaatgacgtcaagaaccttaaactgttcctggatggtgttctcagactcatccattttataaaacctttggccttaaaatcggatgacaccttagaaaaagaagaacatttctatggtgagtttatgccgctgtacgacaaactcgttatgtttacactgctgtacaacaaggtacgcgattacatcagccaaaaaccgtataatgatgaaaagataaagctgaattttggcaactctaccctcctcaatggctgggatgtcaataaagagaaagataattttggagtaattttatgcaaggagggactctattatttagcgatcctggataaatcacataaaaaggtgtttgataacgccccgaaagcgaccagtagtcacacttaccagaagatggtttataagctcctcccgggcccaaacaaaatgcttcctaaagtttttttcgcgaagagcaatatcggttactatcaaccttccgcacagctgctggaaaactatgagaaaggaactcataaaaaagggtcaaacttcagcctcacggactgtcaccatctcatagattttttcaaatctagtattgcgaaacaccccgagtggaaagaatttggctttagattcagcgacacgcatacatatcaggatttgtccgatttttacaaagaaatagaaccgcagtcctataaagttaaatttattgatatcgatgctgattatatagatgatctggtggaaaaagggcagctgtatttgtttcagttgtataataaggatttttctaaacaatcctacggcaagcctaatttacataccttatactttaagtctttgttctcggacgataacttaaagaatcccatttataagcttaatggtgaagccgaaattttttatcgccgtgccagcctttctgtttccgataccactatccatcaagcaggcgagatcctgactccgaaaaatccgaacaatacccacaatcgcacactgagttatgacgttattaagaataaacgttatacaaccgataaattctttctgcatatcccgataactatgaactttgggattgaaaatactggtttcaaagcgtttaatcaccaagttaacacaacgttgaaaaatgctgataaaaaagacgtgcatattattggtattgatcgcggagaacgccacctgctctacgtaagtgtcatagacggtgatgggcgcatcgttgaacaacgcactttaaatgatattgtaagtattagcaataatggcatgagcatgtctacaccgtaccatcagatcctcgataatcgtgagaaagaaagactggcggcgcgtaccgattggggtgatatcaaaaatattaaggaacttaaggctggttatttgagccatgtggttcatgaggttgttcagatgatgttgaaatataacgctatgatcgtcctcgaggacctgaacttcggttttaagcatggtcgttttaaagttgaaaaacaggtataccaaaatttcgaaaacgcgttaatcaagaagctgaattacctggttctgaaaaatgccgataatcatcagctgggcagcgttcgtaaagcattacaattaacaaataacttcacagatattaaatcaatcggcaaacagactggattcattttttatgtgcctgcttggaataccagtaaaatagacccgactaccggtttcgttgatttgctcaaaccgcgttatgagaatatggcacaagcgcagtcgttcattagtcgttttaagaagatcgcatacaatcaccaactggattatttcgagttcgaatttgattacgctgatttttaccaaaaaaccatagacaaaaaacgtatctggacgctttgtacatacggagacgtacgttattattatgatcacaaaaccaaagagacaaaaaccgtgaacataacaaaagaattaaaaagcctcctcgataaacatgatctttcttaccagaatggtcacaatctggttgacgaactggccaattcccatgacaaaagccttctttctggggtcatgtatctgttgaaggtgctcctggcattacgttatagccacgcccaaaaaaacgaggacttcattttgagtcccgttatgaacaaagatggtgtgttttttgattccagatttgccgatgacgtattaccgaataatgcggatgccaacggggcctaccatattgctcttaaagggctgtgggttcttaaccaaatccagtccgctgataacatggacaagatcgatctttcaattagcaatgaacaatggcttcattttacacaatcccgt

SEQ ID NO: 668 - DNA, 3852 bp, synthetic construct
  misc_feature 1..3852: note = Sequence codon optimized for E. coli expression
  source 1..3852: mol_type = other DNA
atgaaagattttacgcatcagtattccctgtctaaaactctgcgctttgagctgaagcccgtaggcgaaacagcggaacgaattgaggactttaaaaatcagggtttaaaatcgatcgtggaagaggatcgccagcgcgcggaagattataaaaagatgaaacgcattctggatgattaccacaaagagtttattgaagaagtactcaacgatgatatttttacagcgaacgaaatggaatctgcgtttgaagtatatcgtaaatatatggcctcaaaaaatgatgataaactgaagaaggaaattacagagatctttacagacctgagaaagaagatagcgaaggcctttgagaacaagtcaaaagaatattgtctgtataaaggagatttttctaaactgataaatgaaaagaagactggaaaggacaaagggccggggaaactgtggtattggctgaaagcaaaagcagatgcaggtgtcaacgaattcggcgatggtcagacttttgagcaggcggaggaagcacttgctaagtttaacaattttagcacgtattttaccggatttaaccaaaatagagacaacatttacaccgatgcggaacagcagactgccatctcatatcgcgtcattaacgagaatatgacccgttatttcgacaactgcattcgatacagtagcatagaaaataagtatccggaactggttaaacaactggaaccattatcaggtaaatttgcaccgggtaattataaggattatctttcacaaactgctatcgatatatataatgaagcagtcggccacaagtccgatgatatcaacgccaaaggtattaaccagtttattaatgaataccgccaaagaaacagtattaaaggacgtgagctcccaatcatgtcagtgctgtataaacagatattatcggacatcaataaagatcttattatagacaaattcgaaaatgcgggtgaactgttagacgcagtaaaaactcttcaccgcgagttaaccgacaaaaaaatcctgctcaaaattaagcagactctcaatgagttcctgacagaggacaacagtgaagatatctatataaaaagcggcacagatcttactgcagtgtctaatgcaatttggggggaatggtctgttattccgaaggccctggagatgtatgctgagaacataactgacatgaacgctaaggcgcgcgagaagtggttgaaacgagaagcgtatcatttaaaaaccgttcaggaagcaatcgaagcgtatttgaaagataatgaagaatttgaaacgcggaacatatcagaatatttcacaaattttaagtctggcgaaaatgatttgatacaggtggtacagtctgcctacgctaaaatggaaagtatctttggaatcgaagactttcataaagatcgccgtccggtgaccgagtccggagaacccggcgaaggctttcgccaggtagaattggtgcgggagtatcttgattcattgattaacgtggagcattttattaaaccattgcatatgttccggtcgggtaaacctatcgagctggaggattgcaatagcaacttctatgatcctctcaacgaggcctataaggagctcgatgttgtttttgggatatataataaagttcggaattacgtcactcagaagccttattcgaaagacaaatttaaaattaatttccagaattcaacgttacttgatgggtgggatgttaataaggagtcagcgaattcgtcagtgctcttactcaaaaacggtaaatattatcttggtgtgatgaaacagggcgcttctaatattctcaattaccgccccgaaccttcggactcgaaaaataaaattaacgccaaaaagcagctgtccgaaatcgcactggccggtgcgaccgacgattactatgaaaaaatgatctataaactgctgccggatccagcaaagatgctgccgaaagtcttcttcagcgcaaaaaatatcgaattttataacccaagtcaggaaattatctacatccgtgagaatggccttttcaaaaaagacgctggggataaagaatctctcaagaaatggattgggttcatgaaaacaagtctgctgaaacacccagaatggggatcttattttaattttgaatttgaacccgcagaggattatcaggacatctctatcttttacaagcaggtagcagagcagggctattcagttacttttgataaaataaaaacatcatatattgaagagaaagttgcatctggagagctgtacctctttgagatttataacaaggatttttcaccgcatagtaagggacgaccgaatttacacaccatgtattggaaatccctgttcgagaaagagaatctgcagaacctggtcacaaaactcaacggtgaggcggaagtttttttccggcagcattctatcaaaagaaatgaaaaggttgtccatagagcgaatcggccaattcaaaataaaaaccccctcaccgaaaaaaagcagtcaatttttgagtatgacctggtcaaggatcgtcggttcacaaaggataagttttttctgcactgtcccattacgctgaacttcaaagaagccgggcctggcagatttaatgacaaagttaataaatacatagctggcaatccggatatacgaataattggtattgatagaggtgagcgccacttgctttactactcccttatagatcagagcggtagaatcgttgagcaaggaacacttaatcagattacgtcaacactgaatagtgggggacgcgaaattccaaagaccacggactatcgcggcctgcttgatacgaaagaaaaagaaagagataaagctcgtaagagttggtccatgattgaaaacattaaagaattaaaatccgggtacctgtcacatattgtacataaattagctaaactgatggtgaaaaacaacgcggtggttgttctggaagatttgaatttcggcttcaagcgtggccgatttaaagtagaaaaacaggtttaccaaaaatttgaaaaagcgttaattgagaaacttaattatctggtgttcaaagatgcacgccccgctgagccgggtcattatctgaatgcttaccagttgacggctccactggaaagttttaaaaaattaggcaagcagtcaggttttatatattatgtgcccgcctggaacacctctaaaattgaccccgtgacgggttttgtaaatcagttttatattgaaaaaaactctatgcagtatcttaaaaattttttcggaaaattcgatagtattcgctttaatcccgataagaattattttgaatttgggtttgattataaaaactttcataacaaagcagccaaatccaaatggacgatttgcactcacggtgacaagcgctcgtggtataaccgtaagcagcgaaaactggaaattcataatgtgaccgagaatctcgcttcactcctgagtggtaaaggcattaactttgcggatgggggttctataaaagataaaattttgtcggtcgatgacgccagtttctttaaaagtttagcgttcaacttcaagttaactgcacagctgagacataccttcgaagataacggagaggagattgattgtattatctctccggttgccgccgccgatggtacgtttttctgttcagaaaccgccaaaaaactgaatatggaattaccccacgacgcagatgccaatggggcatataatatagcacgcaaaggacttatggtgcttcggcaaatccgtgagtccgggaaaccgaagcccattagcaatgcagattggttggattttgcacagcaaaatgaggat

SEQ ID NO: 669 - DNA, 3612 bp, synthetic construct
  misc_feature 1..3612: note = Sequence codon optimized for E. coli expression
  source 1..3612: mol_type = other DNA
atgaaacagagcacgcagtatgatgattttacgaatgtgtattcactgagcaaaactctgcggtttgagctgaaacctgatcctcttacagcagagtatattgagaaagagcaaatgttagaaaaggataaatccatttctcagtcttatcaggagatcaaagagtactttgatagactgcaccgcgactttatcaatgaagcactggccaaagtgaatttagattgttcccattattgggaattatttcaggccaaggataagaaagcactgcaaattgaagccgacaaactccgtaagaacttcggaactgctttcaacttggtgggtcgccaatggagtaaactggccggaatcaaagaagaaaacgaagagaatgaagggaacaaagaccagtccaaataccgtgatattctctttaaaaaagaagtgctggatatcattaaagctcggtacggccagggtgatgcacgtttagccgccctgctggagacctttaagaatttctttacatattttattaattttaacgagtcacgtaagaatttctataagctggatggtacgagtacagccatcgccactagaagcatagatgtgaatttaaaaattttttgctcaaatatagcgaatgtgcaatatttaccggatggcattcagttgacagatgaggaacgcagcttatttgaaattcggaattatcagacgtttttgcagcaagaaaaaattaaacaatataacgatctgataggtactatcaacgggaaaattaacaactatcgtcaggccaaccatcaaaaaataggctttttaaaaatcttacagaagcaaattttaggggatgccaacaaccctagcacaaaattcattgagataaccgacgatgcatccgtgtttccggttctgaatgagctgataaataatgccgaagaaccgtttcgtaaattttacaaagaactgctgccgaaaatactgcctgatactacggataactccatcgatctgtcgaaagtctacctttctaaggttgctctgaacactatctcctcgaaagtgtgtcaaagctggtgtacactcaaagacattttggaaaaaaaaaatgatttcagtttagacaatgttctgacctccttaaaaaataatcagcagcaagcaaaagaaatcttccgtgacgatgtcctgaagaattttctggcagacagtaacgataaaatttttaaaaaatggctctacaatgaatatcaaaaatcatatgaacgttattgcgcagcgaaggacgtgttactgtgcaagatggaacaggataaaagcttccggaaagaagatcaggaacagaaaaatataataaaagaattttgtgacgccgctctcgaagtttatagaatgatcaaatacttctacatcgaccggtctcagaattcagttgaggtggatccgatattctacaatattctggatcccattctggatgattgcagtgtgtatcaatactataacgagataagaaattatcttaccaagaaaccgttttcccaggataaaatcaagttaaactttggtaatggacagttactccaaggctgggatgaaaataaattgaaggactacaaaggcgctattttacgccacggcgatgattattatttaggcattctcatgggtaaccaggtattccaaactaataataaagaagcctatttggataacaccaacgggcacggttgggagctcatgatttacaaacagattgccgacgcgcaaaaagacgttccccgtctgttttttgctaaagcgaacttggctttgtttcaaccatcggacaatattaaacggattaaagatagtaaaagctaccttcgatccagcgacaatttctcctctcaagatctgtatgatttaatcgattattataaatcgtgtattgaaaagtaccccaattggcaatgttatgacttccattttctgcctacggaggaatacaaaaacatgaaagattttactgacgacatccaatcttgtgcttacaaagtaaagttcgttcctgtacgggatcaatatattaaagaacagcagagtcaaaaacaaagccagaaacagtcccaagtgggtttattattatttaaaataactaacagagactttttaccgcaagcccacggttgcgacaacttacataccaaatactttcgagcgctgtttgatcaggagaatttacagcatcctgttattaagctgaatggaggagcggagattttctttcgtcaggcatccataaccccgaaacttgtagaacgaggtcagaaatgtattattgaaaatcggcgctatactgaagataaatacttattccattttccgattaccctcaatgtcaatcacaagattacccctcgtgcatttcgcgctaagataaacaatttgctgtataccaaccctaatatcaatatcattggcattgaccggggcgaaaatcatctcctgtatatctcggtagttaatcagaaaggtgaaattttggacggacctagacctctggatacagttaacggaattgattatttgggtttgctggaaaaagtaagtaaagaccgtgatcgtgcccgtaaaaactgggaaagtatagccaaaattaaggacttaaaagctggatacgtcgggcaggttgttaaagtgatcgccgacctggcgctgcaatataatgcgattgtagtgttagaggatcttaacaccggctttaaacgctcccggcaaaaaatagaaaaacagatttaccagaacttcgaattggctcttattaataagttaaattactttgtaaaaaaggaagctatgccaggcgagaagggccactttctgtcagctttccagttaacggagccaataaccagttaccaagacgttggtaaacagacagggatcatattctatgttccggctgactatactagtatcacctgcccacagtgtggctttcataagagttttaatttttatcataaaaacaagaccgaggacgaacacttattaaagacgatggatctccgttatgataacgatgacgaatgttttaagctgacctgcaatctgatggcgctgagcaataataaaaagcaagacaacaatgaacttgaattaagtagcaaaaatattcaacgatggcgttgggggacaaataaacgtgagttagtgtcgtatgatattactaaatgcttagcggaactttttagtaaattacaaatcaattatactcaagaacggggtaaccttcttaatttatttatttcgcagcagccgacgagccaggactacgatgccttaattttttatttgcagctttggcaaaaaatacggaacagttcccccacgtccccagattacattcagtgcccccattgtggttttcactcggataacgggtttcgtgggaaggaatggaatggtgacgccaatggtagttacaatattgctagaaaaggcatcctgatactgggtaaaatcaaacaatttggcgacaatcatcacgaccgcgatcaagaacacatttttgatgatctgaaatggagtgatctctccattaatactgaagaatggaatgagtatgtaggacggcaa

SEQ ID NO: 670 - DNA, 3891 bp, synthetic construct
  misc_feature 1..3891: note = Sequence codon optimized for E. coli expression
  source 1..3891: mol_type = other DNA
atgaacgcccagaaatcgttctttggcgactttaccaacttgtacagcttgcaaaaaacattgcgctttgagcttgaaccacaaggcaaaacgctggaacatatcgagaacaaagggttgatttctcaggacgaacagcgggcagaatcttataaaaaaatgaaaaagactattgatggattccataaacattttatagaaattgccatgagtcaggttaaactcacaaaacttaaagaatttgtagacctgtataatgcgtcacccgagcgtaaaaaggaagatggttttaaaaaaagcttcgaaaaagttcagacggagttacgcaaggaaatcgcaatgggcttccgtgccggtgaagccaaagagattttctccaaaattgacaaaaaagagcttgtcacagaccttcttgagaagtggatgcagactcaggaagaggacctctattttgacgaaagctttaaaactttcaccacttactttggaggtttccataaaaatagaaaaaatatgtatacagataaggagcagagcacctcgattgcctatcgtctcgttcatgaaaaccttcctaaatttcttgacaacatcaaagtatttgaacgtatcaaatcaatcccggtgctttatgaaaaatgtaccacattatacactgaaattaaagaacatctcgacattaaagatatcaacgaggccttcaatctttattgttataataaagtcctgactcagaaacagatagacgcgtataatcttgtaatagggggcatgactgcacaagaaggcaaaaaaaaaatccagggtctgaacgagcatatcaacctttacaaccagagacaggataaaaaagatcgtataccaaaattaaaacagttgtacaaacagatcctgtctgacagagaaagtgtcagttttctgccggaagctttcgaggacgatgagtctaaaacggcatctcaaaaggtgttgaattctatcgaagagtactatcaggcgaacttggtctcatttcatccgcgtgacaaagatgaagcagaaaatgtactggaaaaaatcaaagagctgctcacatcccttaaagattatgattccaacaagatctacctgcgtaatgacaaggctattacagatatctccaaggctctgtttggagactggggtatcatcaaagttgctctggaatttgcatttctgcagactttaaaaattggtgaaaaaggactgagtaagaaacaggagaaagaaaaggaaaactatattaaacagtctcatttctccgtggcagaaattgagaaagcactgtttgcttacaagaacgaagcagaagtcctgaacgaccttcatgaaaacactacacctttagcggactatttccataccaattttctcgcaaaaaagaaggaggaaagcgataaagaattcgacttaatcgccaatattcaggctaagtattcctgcataaaaggcattttaaaccgcgactatccaaaagaaaaacgtttacaccaagataaaaaaacaattggcgacattaaagcgttcttggattcgttaatggaacttttacactttgtgaagcagttgtccttaccctcagacaccacgctcgagaaagatgaaattttctattcccagtttcagccttggtatgatcaattgcagttgttaatcccgttgtacaataaagtccgtaattatgcaagtcaaaaaccgtatagcattgagaaattcaaactgaattttcagtcgagtacactggcgcaaggatgggatctgaacaaagagcacaataaaaattatagttttatcttccaagaaaatgactcattccttctgggcattatcaatatatatgatgataaagacattctgtcaaaagatacacggcctgagatctttgttgatgattcgcccctcaagaaaatggtgtacaagaatctgggagatattaaaagacagctgccgcgcattgccttcagcgataaagccaagaagtgtgtcgaaaagataggctggaaccaagaaatcgaagccatcaaaaaagagttcgatgagttccaggacgctaagaagaacgataaagatttgtggaaggacgaattcgatcgcaaccaactgtcagagttgatagactactacaaaggtgtacttaaaaatcatagcgaacgttatgaagacacatataaacttgaatataaaagcacggagagttataaaaacttgggcgagttttttgaccacattacttcccaaacttataaagtcacgttcgttgggatcgataaaaactacattaaccgactggttgatcagggtaaactctatctgtttcaaatttacaataaagacttctcagaatactccaaaggaaagccaaatctccataccttgtactggaaagctttatttgacccggagaatttgaaagatgttatgtacaagcttaatgggggtgccgaattattttatcgtaaaaagtcgataaaggacttggcgatacacaaagcaaacgaacctataaaaaataaaaatccgaacaatccgaaaaaggagtccgtgtttaaatatgaaatagtcaaggactaccggtacaccgtcgataaatttcattttcatgtcccgattaccctcaacttcaaggcaacagaagccgggtatataaataataccatattgggtttcctgaaagataatccggacgtgaatataattggaattgatcgcggtgaacgtcacctgatttatctgacgttaatagatcagcggggcaacatccttgaacagcgatcccttaataccattatcaataaaaaattcaacgttaagaccgattatcacggtttactggataatcgcgagaaggaacgcgataaagctcggaagaactggggtacgatcgaaaccatcaaagaattaaaagagggctatatcggcattattgtacacgagatctcacggatgatggttgaacataacgcgattgttgtgatggaagatctgaactttgggttcaaacgtggtagattcaaagttgaaaaacagatataccagaagttagagaaaaaactgatagacaagctgaactatttaatctttaaagacaaagctaacaatgagacgggtggtttgtataaagctttgcagttaaccagcaaattcgagtcctttatcaagcttggtaaacaatcgggattcctgttctacgtcccggcatggaacacgtctaaaatagatcctactacagggtttgtaaacctctttaatacacgctatgaaaacgctgataaagcgaagacttttttcgacaactttgaaaacatctgttataacgtagagaaggggtattttgaatttaaggttaagaaatactcgctgttcaatagtaaggctgatgatacgcggcaagaatggattatatgcacgcagggagaccgcattcgtacgtttcgtaatccagagaagtctaaccagtgggataacaaagaaattgttttgctggatgagttcaaaaacctcttcaaagaatatggcatccgttacgaggaagatctgaaacatcagatactcagtcagacggaaaaaacgtttttcgaaaaacttctgaacctgtttaaaattacagtacagatgcgcaactcaataacaaattcagaaaccgattacttaataagccctgtgatgaacgctaaaggtgagttttatgattcgcgaaaagccggcgataaccttccaaaggatgcggatgctaatggtgcgtatcatatcgcgaagaagggactgtggttactgaaacaaattgatgcgcatgaaggcgaagattggaaaaagttaaaattagccatcaccaataaagaatggctgcaatttgcacaggcacgcggacgtctg

SEQ ID NO: 671 - DNA, 3795 bp, synthetic construct
  misc_feature 1..3795: note = Sequence codon optimized for E. coli expression
  source 1..3795: mol_type = other DNA
atggagcgtaaagatttcatcaattacgaccaggtatctaaaacaattcgaaatgggctgataccgacagaatatacattgaaaaatattgaagaaacaggtgtcttggttagcgacgagtaccgtgccgaggtcagaaacgttttaaagaagattatggatgattactataaagagtacattaacatgtgtctgaatcgcgaaattaaaatggattggcgccctctgtttgatgcgtatgagctggtaaaaaaaggcaaaatgaagcctaaagaaattgaaaatattcaggatgaaaaacggaaagaaatttatgatattctgtccgctcatgatgagtttaagaaaatgttttcagccaaaatgatcaccgaactgcttccgcagtttatctcccagagcaccggctataacgaagatgagaagaaacagtacgaagaagtaattcacatttacagtcgatttacatcggactttactgatttttttcaaaatagaaaaaatgtattctcatccgcggggatcgcaacttctatttgcaatcgcattgtgaatgagaatgcagaaatattcagtgataataagtctacttttgatcgcattaaaaaggatatttcatacatcgatgaaattatcgattcagatctcaaaacgtatcttgacgggtgggagttagaacaaatttattccgtagacttctatagccgtctgatgagtcagagtggaattgatttttataacatgattagtggcgctgtaaacaaagcagtgaatgagtattgtcagaaaaatggactgaataaaaataaatatttattacgtaaattacgcaagcaaatactcagcaactccgagagcacgtttcaaatcccggaaaagttcctggcagacgaagaagtttataaagctgtcggacagtttattgataacattaagagcaaaaatgtaattgagattttaaaagacatcggcagtaattgtgaaaattatgatctgcgtcggatttacattgcggaatcagcgtatgaagacgtctccatttttatgggctatggatggaacggtattaaaggctgccttgagaaaaaatatgaaaaagagattgcacctggcaaagccaaggatatcaaaatcaaaaaattgattagccaggaaaaagaacgctcaataggagaaattgacgaattgtttcatatctatggcgaagaaaaggacggcaaagcggctatccaatatattgaggaagtcgtggaactgtgtaatgaagtaccaacacgtctggtttatgattcttctgaaaaactgaccgaaaatgataataaagctgcagaaattaagaacgtgttagattattattttaagatattccattggatcaaaacgttcatcaccgatgatatccttgacaaagacattgtgttttatagcggtattgagtttgcttatgaggaaattaaagatattgttccgctctataacaaagtccgtaattacgtaacccagaaaccgtatagttccgaaaaaatcaaacttaagtttggtactcccacgttagccaatgggtggtccaaatctaaagagtttgacaataatgccatcctgctggttcgtgataataagtattacctgggcatattcaacgtgctgaataagccggataaaaaaattatggctggatatgccaacaagaagaatagttctgattacgccaaaatggtttacaatttactgcctgggccgtccaagatgcttccgaaagtatgcctttcacagaagggcaaagacacgtatcacccaagcgcttacatcgttgacaattatgaacgtaaagcccatgtgaagagcagcgagcatttctccattcaatattgtcacgacttgatcgattactttaaggaatgtataaaacgcaatgatgattggaaatgttttgatttcaaattttcagacaccgaacagtataacgatatttctgaattctacaaggaagtcgaactccaggggtacagcattggttggacctatatttcaggtgaagacattgaggccctggataaagaaggcaaactgtatctgttccagatttataataaagatttttccgaacagtcacatggaacggataatttgcatactatgtatttaaaaaatctgttttcgccagaaaacctcaataatatagttcttaagcttaacggcgaggctgaactgttttatcggaaatccagcatcaagaagccggttgtacataagaaaggctcaatactggtcaacaaaacgtacaccgaaaaaaccggaaacggtgaggaggtgcgtcgtccggtacctgacgatgtttatctggaactggttaattattataatggtgaacagaaggcaatcttgtctgatgaagctaaaaaatatatgaaagttgttgaacaccacgaagccgtcaaggatatcaccaaggactatcgttataccgttaacaagtttttcattcatttaccgatcactattaactttaaagccgaacacacgggcaatctcaacgaaatggtaatacaatacattgcaaagcaggaaaatatgcacgtaatcggcattgaccgcggtgaacggaatcttatctatgtgtctgtgatcgatatgaatggtaagattaaagaacagaagagttttaatatcgtgaattcttacaattatcaggaaaaattgcgaggtcgcgaaaaagatcgtcttaacgcacgcaaaaactggaagcagatcgcaaacattaaagaaatgaaagaaggctacttgagcttggtaatccatgagattacagagatgatgatgaaatataatgcgattatcgcaatggaagatctgaattacggttttaaacggggtcgcttcaaagttgaacggcaggtgtatcagaaatttgaaacaatgctgatcagtaaattaaattacctcgttgacaaacataaaaaagttgacgaaccgggtggtcttttaagaggttatcagtttgcatatgtgccagcttcgttggatcgactgggtcgtcagtgtggctttatcttctatgtcccggctgcatatacaagcaagatcgatccgactactggctttgtagatctgttcaaccattccgaacttattaaagcgggtaagagacgcgataacctgagcaagtttgacgggatatattacgatgaacaaaaagacatgttctgttatgcgttcgattataagaactttgttacacataatacggatatttaccaaaatagttgggaaatatacaccaataaggaacggctccgtaaaatttttggtaacggaagaccaactgggaaaaccgaaaagattgagctgacccaaatgatgaaagaagttctgactggtgcaggggtagagtataaagacggtcataacttaatcgacgatatactgaatagtaatgataattgcattaaacaggtgctggatatattcttatatagtatccaactgcgtaatagcaaaggagagaatgaagactctaaagaaagtgattacgatcgtattatctctcctgtcttaaaccaagaaaatgagttctttgattctgtagtctatgccgataagtacaaaaaagacgagaagcttgcagacaaaccgatcgacgcggacgcgaacggtgcttattgcatagcattaaagggtctctatgaaatactccaaattaaaaacaactggaaagaaggtgaagttttcagtcgtgacacactgaagatcacaaatgcagattggcttcgttttatgcagtctcgcggctttgaa

SEQ ID NO: 672 - DNA, 3840 bp, synthetic construct
  misc_feature 1..3840: note = Sequence codon optimized for E. coli expression
  source 1..3840: mol_type = other DNA
atgaacaagttcgaaaatttcacgggactgtaccctataagtaaaacgttgcgttttgaactcatccctcagggaaaaacgctcgagtatattgagaagagcgaaatccttgaaaatgataactatcgcgcggaaaaatacgaagaggttaaggatatcatagatggctatcataagtggtttataaacgaaacgttacacgatttgcatattaattggagtgaactcaaagtggcgttggagaacaatcggatcgaaaaaagcgacgctagcaaaaaagagcttcagcgggttcaaaaaattaaacgtgaggaaatttataacgcctttatagaacatgaagcgttccagtatctgttcaaagaaaacttgttgtctgatctgttgcctattcagatcgaacagagcgaggatctggatgccgaaaaaaaaaagcaagctgtggaaacatttaatcgttttagtacctatttcaccggcttccatgaaaaccggaaaaacatctactccaaagaaggaatatcaacatctgtcacctatcgtatagtacatgataatttccccaaatttctggaaaacatgaaggtcttcgaaattcttcggaacgaatgtccggaggttatatccgatactgccaatgagctggccccttttatcgatggagtacgcattgaagatatatttctcattgattttttcaacagtacattcagccagaacggtatcgattactataatcgtatcctgggaggggtcaccactgagacgggtgagaaatacagaggcattaacgaattcaccaatctctacagacagcagcatccagaatttggaaaatctaaaaaagcaacaaaaatggtcgtgctttttaagcagattctgtctgatcgcgatacattatcgtttattcctgagatgtttggtaatgacaaacaggtccaaaattctatccagctgttttataaccgcgaaatctcgcagtttgaaaatgaaggagtgaaaacggacgtgtgcactgcgctggccacattaaccagcaaaattgcagaatttgacacggaaaaaatttatattcagcaaccagagttaccaaatgtgtcccagcggttgttcggcagttggaacgaattgaacgcctgcttatttaagtatgcggaactcaaatttggtaccgcggagaaagtcgcgaatcgcaagaaaatagataaatggttaaaaagtgatcttttctcctttaccgaactgaataaagctttggagtttagtggcaaagatgagcgtattgaaaactatttttcagaaacgggcatctttgcacaacttgtgaagacaggttttgacgaagcccaatctatcctggagacagaatacacatcggaagtccatctcaaggatcagcaaactgacatagaaaaaataaaaactttccttgacgccctgcaaaatcttatgcatttattaaaaagcctgtgtgtcagcgaggaagccgatcgcgatgccgccttctataatgagtttgatatgctctataaccagctgaaactggttgtcccgctttataacaaagtacgcaattacataacacaaaaactgttcagatcggacaaaattaagatctactttgaaaataaagggcagttcttgggaggttgggtcgactcccagactgaaaacagtgataatggaactcaagccggtggatatatttttcgtaaagaaaacgtgattaatgaatatgattactatctgggtatttgctcagatccaaaactgtttagacgtacaaccattgtcagtgaaaacgatcgatcttcgtttgaacgtttagattattaccagcttaaaacggcttcggtctatggaaattcctactgtgggaagcatccctacacggaagacaaaaatgaattagtgaattccattgatcgtttcgtccatctgtcagggaataatatccttattgaaaagattgccaaagataaagttaagagtaacccaacgacgaataccccttcgggctatctcaactttattcatcgtgaagccccgaacacatatgagtgcctcttgcaggatgaaaattttgttagcttgaatcaacgggttgtgtctgccttgaaggcgacattggctactctcgtgcgtgttcccaaggcgctggtttatgccaaaaaggactaccatttatttagtgagattattaacgatatcgacgaattgtcttatgaaaaagcatttagttactttccggtatcccagactgagttcgagaactccagcaaccgtacaataaaaccactgttactttttaaaatttcgaacaaagatttgagtttcgccgaaaatttcgaaaaaggcaatcgccaaaaaattgggaaaaagaacctgcataccttatactttgaagctttaatgaaaggtaatcaagatacgattgatatcggaaccggtatggtgtttcatcgtgttaaatctctgaattataatgaaaaaacgttaaaatatggccatcatagcacacaactgaatgagaaattctcttatccgataatcaaggataagcgctttgcgagcgataaatttctgtttcatttgtccacggagattaactataaagaaaaacgcaagcccctcaataattcaattatagaattccttacaaacaatcccgatatcaatattattggccttgatcgtggggagcggcatcttatttaccttacactcataaaccaaaaaggagaaattttacgtcagaaaacattcaatatcgttggcaataccaattatcatgaaaaactgaaccagcgggaaaaagaacgtgataatgctagaaaatcttgggccacgatcgggaaaatcaaagagttaaaggaaggctttcttagcctggttatccatgaaatagcaaaaataatggtggagaacaacgcgatagttgtgcttgaagatttaaactttggttttaaacgggggcgattcaaagtggaaaagcaaatttatcagaaatttgaaaagatgttgatagataaactcaactatctggtgtttaaagataagaaagcgaacgaggcaggtggggtgttaaagggttaccagttagccgagaagttcgagagttttcagaaaatggggaaacagtccggttttttattttacgtgcccgccgcgtatacctctaaaattgacccaaccactggttttgtgaatatgttaaacttgaattatacaaatatgaaggatgcgcaaactctgctgtcgggaatggacaagatttctttcaatgccgacgcaaactacttcgagttcgaattagattatgaaaaatttaaaaccaaccagacagatcatactaataaatggacgatttgtacagtgggagaaaaacgctttacctataattctgctactaaagagaccactactgtgaatgtgaccgaggatcttaagaagcttctggataaatttgaagtcaagtatagtaacggtgacaatattaaggatgaaatctgccgccagaccgatgcaaaatttttcgagattatcctttggctgttaaaactgaccatgcaaatgcgtaatagcaataccaagaccgaggaagactttatattaagcccagtgaaaaatagtaatggggaattttttcgttcgaatgatgacgcaaatggaatttggccggcagatgccgatgcaaatggcgcctatcatatagctctgaaaggactgtatctggttaaagagtgcttcaataaaaacgaaaaaagtcttaaaattgagcataaaaattggtttaaatttgcacagacccgtttcaatggtagtttaaccaaaaacggc

SEQ ID NO: 673 - DNA, 3939 bp, synthetic construct
  misc_feature 1..3939: note = Sequence codon optimized for E. coli expression
  source 1..3939: mol_type = other DNA
atgctggaccgcttcactaatcagtatagtgtgaccaaaactctgaagttcgaattacgtcccatgggcaaaacccttgaacatgttcaaaaaaaaggatttgtggaaactgatgaaaagctggccacgaattataagagaattaaaaagactattgatgtatatcacaaagactttattagtcgcgcactttcacagctgtcgatctctaatcttgatgaatttctggcttcatacgaagataacaaaaagaatccggacgataagacgaagaaacaattggtgcgaatccaggataatctgcgcaagcaaataaccagtgcgttcaccgctgccgaattcaaaacagagttctcagaactgtttaagaaagaactgctgactaaaaacctcgaatcgtttgtcttggagtataataaaaaaaatgatgcggatttgttcttcgttgatgatttcaaaaattttgcaacttacttcatcggatttcatgaaaatcgcaaaaatatctacagcgccgatgcgaaacatactgctctggcctttcgtattattcatgaaaacctccctaaatttatcgaaaatatgaacagcctccaactgattaaagatgactacccagccttatatgagtcactccagaaccaggtttctaccgagttaagttctatattttcagcgggttttgtcttggatgacgtcttgaatattagtttctataatgagctgctgagtcagcaggggatcgaccggttcaatcagctgatcggcggcgtaagcactcagagcggagccaaaaaaacacagggtttgaatgagttaattaatgagtataatcagcagtcccccagatcttctggcaatcgaaaagccccgaaaattcgcccactttacaaacagatcctcagtgatcggggaagcctctcatttttaccggaaaaattcgcggatgatcgcgaattgtacgacgccattaatgactattacttgtctcacctgctgatggtaccaaatgatagctcagaacacacgctgcttgactctctcaaacatctggtggcttccctgccctcctttgatctgacaaagatctatctgaaaaacgacaaagcaatttcgtcaatttccaaccgtttgtttggtgattattctgtacttcctatagcactgggttattattacgaccatcacataaatccggatcacttggaccaactcgcggcggcaaaatctcagaagaaaacttcagacttgtataaaaagaaagacgcttttaccaaaggttatcatagcgtagccactattgaagcagcctatcaggcatatttggcaagcaccgactcagataatgggcttcgtaaatcaggcattataaatccagtacaggattactttacacgctatttcgtgaacgaaccaaaagaagatggcaaggcggctgttgaccttttgcgtgacatagataacaaatacaccacgattaaaggcgtactgaacagtgagatcgaagaaggcacccggcagcttctccagaaaggtgccgaggtagccaatattaaacacttcctcgacgctgtgatgaacctgatacatttcgtcaaacctctggggagcgtgattgaagaggacagtttgcttgatatcgacgcccggttctataatgattttttgccattatatgaagaactgaagttatttttccctctgtacaataaagtgcgtaattatatcagtcagaaaccttattccaatgagcagttcaaattgaattttgagaacgctaacctgttagaagggtgggatgtcaataaagaaaaatctcgtcttagcgtgcttttgcaaagagatgggcggtattatctggccctgatggataaatcacataaaaaagtctttgagcaggcacccgaaataaccccgggatccgaaaactcaaatagcccttatcaaaaaatgcgttataaactcctgccggggcctaataaaatgttccctaaagttttctttgcaaagggtaacattgattattttgctccatcacaacagcttttggaaaactacgaaaagggaactcacaaaaagggcgatgattttaatatagaacactgccatcagttaattgattttttcaagcaaagtgttgccaagcacaaagactggcacgaatttgggtttaaattttcagacacctcaacgtataaagacatttccgaattttataacgaagtctcgaaacagggctataaggttacgttcgaagatgtagatgcagactacattgacactttagttgaaaatggtcagttgtatttatttgaaatctacaataaagatttctctgtcaatagccgggggaaacctaatttacacacaatttacttcaaagccctgtttgatgatgaaaatctcaaggacgccgtctataaattgaatggtgagggtgagctcttttacagaaaagcatcgatcgaccccgagaataccataaaacataaaaaaggtgaacgcgtatacagtaaaaacccgttgacaccggatgcttcaagagttttagattacgagattgttaaagataaacgttacacggccgataaattcctgctgcatctgccggtcaccatgaattttaaagccgacggtattgggccgggtcagtttaataatcttgtaaaagatacaatccgcgacgatcagaataaggacatgcatcttatcggcatagaccgaggggaacgtcacctgttatatctgaccgtaattaaccaggatggtctcataattcaccaagaaagtttaaacgatgtagtttcaagtaataaaacagttactccatatcatactctgcttgacacccgtgagaaagaacgtgatgatgctcgaaaaaactggggagtgattgagaatattaaagatctgaaaaaaggttatctgtcacaagtcgttcataaactggctaaactgatctacgaatataacgcggttgtagtgctcgaagatctcaatttcggtttcaaacgcgggcgcttcaaagtggagaaacaggtataccaggcatttgaaaaagcacttatcgataaacttaattatctggtatttaaagagttcgaatccgacgcactggggggcgcgcgcaaagccttacagctgacctcagcattcacggcttttaaggatctgggcaaacagacagggtttctgttttatgtcccggcctggaataccagcaaaatcgatcctgtaacaggatttgtagatttgttaaaaccgaagtatgaaaatgtggagcaggccaaggatttcatcgatcgcttcgactcaattcgctataataaagaaaaagatttcttcgagttcgaatttgactattcgaactttggcacacgcgcccaggatacgcgtacggactggaccatttgcagccatggaacgaaacgttatgtttacgataaaaatgctaacaacaataagggcggccaaaaacaaatagatgtaaacaccgagttaaaagccctgttctccagttatgatattgactatcatggtgagctggcgggacgagacttacgtccgatgatcaagtcaaaaggcgacaaatcgatgtattcatctatcatttttttattgaaaaccctgctcgctatgcgctactccaaaacgaatggtagtaaagtggaggattttatccttagcccggtgtctaatgatgctggcgtgtttttcgatacccgcgattacgacggtatggacgctgatagcagtagtgagacatctactgtccttccgaaagatgctgatgcgaatggggcataccacatagctttgaaagggttatgggtgatgcgccagatacaatctcatacgggtgacgattacaaaggcttagatctgaagataacgaacaaaaactggctggagttcgtacaaactaaaccttatcagaag

SEQ ID NO: 674 - DNA, 3747 bp, synthetic construct
  misc_feature 1..3747: note = Sequence codon optimized for E. coli expression
  source 1..3747: mol_type = other DNA
atgaaaaaaattgactcattcaccaattgttacagcttgagcaaaactcttcgttttaagttgattccgattggcgccactcagagtaattttgacttaaataaaatgctcgacgaagacaaaaagcgcgctgagaactattccaaggcgaaatccataattgataaatatcatcgtttttttatagataaagtgttgagctcggttactgaaaataaggcgtttgacagtttcttagaagatgttcgggcatatgctgaactctactatcgaagtaataaagacgatagcgataaagctagtatgaaaacactggaatcaaaaatgcgcaagttcatcgcacttgcactgcagtccgatgaggggtttaaggatctgtttggccagaaccttattaaaaaaacattgcctgaatttcttgaatcagatactgataaagagataatagctgaattcgacggcttctcgacctacttcacgggcttttttaataaccggaaaaatatgtactcagcagatgatcagccaactgcaatttcttaccggtgcatcaatgataatctgccaaaaatactggataatgttcgcacgtttaaaaactcagacgtcgcgaatattcttaacaacaacctgaaaatcctgaatgaagattttgatgggatttatggaacatctgcggaagacgtcttcaacgtggattatttcccttttgttctgtctcaaaagggcatcgaagcctacaatagtatactgggggggtatacaaactcggacgggagcaaaataaagggtttaaacgaatatataaatctctacaatcagaaaaacggcaatatccaccgtatcccgaaaatgaaacaactgtttaaacagattctgagtgaacgtgaatcggtatcattcattcccgagaagttcgactcagatgatgatgtgttatccagcattaacgattattatttggagcgcgatggaggcaaagttttaagcatcgagaagacggtggagaagatcgaaaaattgtttagcgccgtgacagactacagcacggatggtatatttgtcaaaaatgcagcagaactcactgctgtctgctctggcgcattcggatactggggtacagttcaaaatgcgtggaataacgagtatgacgccctgaatggctataaagaaactgaaaaatatattgataagagaaaaaaagcatataagtcagtagagagctttagtattgccgatatccaaaagtatgcagatgtgtcggagtctagcgaaacaaatgctgaagtgaccgaatggctgcgtaatgaaataaaggagaaatgcaatttagcagttcaagggtacgaaagctccaaagatttaatcagtaaaccatatactgagtcgaaaaaactgttcaacaatgataatgctgtcgaacttataaaaaatgcgcttgacagcgtaaaagagctggagaatgtgcttcggctgcttcttggcacggggaaagaggaatcgaaagacgagaacttttacggtgaattcctgccctgctatgaacgcatatgtgaagtggatagcctgtacgataaagtgcgtaattatatgacacagaaactgtataaaacagacaagattaaacttaatttccacaatccgcagtttcttggcggctgggatcgaaataaagaggccgactacagcgccgttctgctgcgacgtaactcgctgtattacatagcaatcatgcccagtgggtacaaacgtgtgtttgagaaaatcccggccccaaaagccgacgagacggtgtatgaaaaagtgatatataagctgttaccgggtccaaataagatgctgcccaaagttttttttagcaaaaaaggcatcgagacctttaaccctccgaaggaaatcctggaaaaatatgaacttggcacacacaaaactggtgacggttttaatctcgatgattgtcgggcgctgattgattattttaaatcagcgatagatgtgcatagcgattggtcaaacttcgggttcagattctccgatacgagcacgtataagaacattgcggacttttataatgaggtgaaaaatcaaggttataaaattactttttgtgacgtccctgagtcctatattaatgaattagtcgatgagggcaaactgtatctctttcagctctataataaggattttagcgaacattcaaagggtacaccgaacttacatactttgtattttaaaatgttgtttgacgaacgtaatttagagaatgtcgttttcaaactgaacggtgaagctgaaatgttctatcgcgaggcctcgattagcaaggacgacatgattgtgcatcccaaaaatcaaccaataaaaaataaaaatgagcagaattctagaaagcagagcaccttcgaatacgacattgtgaaagatcgtcggtacaccgttgatcagtttatgctccacatacctattacgctgaactttacggcaaacgggggtacaaatattaataatgaggttcggaaggcgctgaaagattgtgataaaaactatgttatcggaatcgaccgaggtgagcgcaatctgctttatatttgcgttgtggattccgaggggcgtataatcgaacagtattcattgaatgaaatcattaacgaatacaatggcaacacgtattccaccgattatcacgcgttgttagataaaaaggaaaaagaacgattggaatctcgcaaagcctggaagacggttgaaaatatcaaagaattgaaagaagggtatattagtcaagtcgtgcataaaatttgcgagctggttgaaaagtatgacgctgtgattgttatggaagatctgaattttggtttcaaacaggggcgctcgggtaaatttgagaaatcagtgtatcaaaagtttgagaaaatgttaattgacaaattaaactatttcgctgataaaaagaaaagcccggaggaaattgggagcgtgttgaatgcataccagcttactaatgcgtttgaatcttttgaaaaaatgggtaaacagaatggtttcatcttttacgtcccagcgtatctcacgagtaagatcgatcccacgaccggattcgcggatctgctgcaccctagtagcaaacagtctaaagaaagtatgcgtgattttgttggccggttcgattcgattacattcaataaaaccgaaaactattttgagtttgaacttgattacaacaaatttccccgttgcaatactgattatcggaagaaatggaccgtgtgtacctatggcagtcgcattaaaacatttcggaacccagaaaaaaattcagagtgggataacaaaacagtggagttgacgcctgcttttatggcactctttgaaaaatattcaatcgatgtaaatggtgatatcaaggcccagataatgtcagtagataagaaagacttttttgttgaactcattggtttattgcgtcttacgctgcaaatgcgtaactcagaaactggtaaagttgatcgggattacctgatttccccggtgaaaaattccgaaggtgttttttataattcagatgattataaaggaattgagaacgcctctctgccaaaagatgctgatgccaatggtgcctataacattgccagaaaaggattatggattatcgaacagattaaagcctgtgaaaatgatgcagagttaaacaaaattagactggcaattagcaacgctgaatggctggaatacgcgcaaaaaaaa

SEQ ID NO: 675 - DNA, 3906 bp, synthetic construct
  misc_feature 1..3906: note = Sequence codon optimized for E. coli expression
  source 1..3906: mol_type = other DNA
atggccgccttcgacaaatttattcaccagtatcaggtaagtaagactttacgcttcgcactgatccctcaggggaagactcttgaaaacacgaagaataatgtactgcaggaggatgacgaaagacaaaagaactacgaaaaggttaagccaattctcgacagaatttataaggtgttcgcggaggaatctttgaaagattgttctgtcgactggaatgacctcaatgcgtgcctggatgcatatcaaaaaaatccttcagcagataaacgccaaaaagttaaagccgctcaagatgccctccgtgacgagattgcaggttactttacggggaagcagtatgcgaatggcaaaaataaaaatgcagtgaaagaaaaggagcaggctgaattatataaagatatcttttcgaaaaaaatctttgatggcactgtcaccaataacaaactgccacaagttaatctgagtgctgaagaaactgagctgctgggctgctttgacaaattcaccacgtattttgtcggattttaccaaaaccgcgagaatgtatttagcggtgaggacatagccactgcgattccgcatcggattgtccaggataacttcccgaaatttcgcgaaaactgccgcatttaccaggacctgatcaaaaacgagcctgccctgaaacccctgcttcaacaggcagcggccgccgtaatggcacagaaccctaaaggcatctaccaaccacgcaagtctctggatgacatattcgtaatacctttttataatcatctgttactccaagatgatattgattattttaaccagatccttggaggtatatcgggtgcagctggtcaaaagaagattcaaggtcttaatgaaaccattaacctgttcatgcagcaacacccgcaggaagcagataagctgaaaaaaaagaaaatcagacaccgcttcattccgctgtataaacaaatccttagcgatcgtacctcttttagcttcattcccgaagcctttagcaatagtcaggaggccctggacgggattgagacatttaaaaaatctttaaaaaaaaatgatacctttggagcccttgagcgcctgattcagaaccttgcctcgcttgatcttaaatatgtgtatttaagcaataagaaagtaaacgaaatttctcaggcgctgtacggtgaatggcattgcatacaggatgttcttaaacaggacttttcactcgagtcgctcattcaaatcaaccctcagaactcttccaacggattcttagccactttaactgatgagggtaaaaaacgcatttctcaatgccgaaacgttttaggtaatccgctgccagtaaagctggcggacgatcaggacaaggcgcaggtgaaaaatcaacttgacacactgctggcggccgtccactacctcgagtggtttaaggcggatccggacctggaaactgacccgaatttcacagttccgtttgaaaaaatatgggaagagctggtccctcttttgagtctttattctaaagtccgtaactttgttactaaaaaaccttatagcacagccaaattcaaactgaactttgctaaccctaccctggcagacggctgggatatccataaggaaagcgacaatggggctttgctgtttgaaaaaggtggactctattaccttggtatcatgaatcctaaggataagccaaattttaaatcgtaccagggtgcggaaccttattaccaaaaaatggtgtaccgcttttttcctgactgtagcaagaccattccgaaatgttcaacacaacgaaaagatgttaaaaaatatttcgaagatcacccgcaagcaacaagttaccaaattcatgatagcaaaaaagaaaagtttcgtcaagacttttttgagatacctcgcgaaatctatgaattaaacaataccacctacggtaccgggaaaagtaaatataagaaatttcagacacagtattatcaaaaaactcaggataaatctggttaccaaaaagcactccgaaaatggatagatttttctaaaaagtttttacaaacctatgtgtctacctctatttttgattttaaagggttacgtccatcaaaagattaccaagatttgggggaattttacaaagatgttaattcgcgctgttatcgagtgaccttcgaaaagatacgcgtacaggatattcatgaggctgtcaaaaatggacagctctatctgtttcagttatataataaagacttttccccgaaaagccatggactgccaaatctgcataccttatattggaaagctgtatttgatcctgaaaatttgaaagatccgattgtgaaactgaatggccaagctgaactgttctatcgtccaaaatcaaacatgcagattatccagcataagacaggggaagagattgttaacaaaaaattgaaagatggaacccctgttcctgacgatatttatcgggagatttccgcatatgtgcaagggaagtgtcaggggaacttatctccagaagctgagaagtggctcccctccgtgacaattaaaaaggcagcgcacgacattaccaaagatcggcgttttacagaagacaagtttttttttcacgttcctatcaccctgaactatcagtcaagcggcaaaccaacagcttttaactcacaggtgaatgatttcctgaccgagcacccagagactaatattattgggattgaccggggtgaacgtaacctgatctatgcagtagtaattactcccgatggtaaaattttagagcaaaagtctttcaacgtcattcatgattttgactaccacgaatctctctcccagagagagaaacagagagttgcggctcgccaggcctggactgccatcggtcgcattaaagatctcaaggaaggctacctgagcctggttgttcatgaaatcgcgcagatgatgatcaagtatcaagctgttgttgtcctcgaaaacttaaacaccggctttaaacgtgtcagagggggtattagcgagaaagcggtctatcagcagttcgaaaagatgctcattgaaaaactgaatttcctggtttttaaagaccgcgccattaatcaagaaggaggtgttttaaaagcatatcagttaactgactctttcacctcttttgccaaacttggtaatcagtcaggctttctgttctatattcctagcgcgtatacgtctaaaatcgatccgggcaccggatttgttgatccgtttatctggagtcacgtaaccgcttccgaggagaatcgtaatgaatttttgaaaggttttgatagtctcaagtatgacgcacagtctagtgcctttgttctgcattttaaaatgaaaagtaacaaacagtttcagaagaataatgtagaaggatttatgcccgaatgggatatttgttttgagaaaaacgaagaaaaaattagtttacaaggcagcaaatatactgcgggtaaacgtatcatatttgatagcaaaaagaaacagtacatggagtgcttcccacagaacgaattaatgaaagccctgcaagacgttggtatcacttggaacacgggcaatgatatttggcaggatgttctgaaacaagcatccaccgatactggatttcggcaccgtatgattaacctgattcgctctgttcttcagatgcgcagctctaacggagcaactggcgaagattacattaactcaccagtcatggatttggacggtcgcttctttgacacccgtgcgggaattcgcgatttaccattagacgctgatgctaatggcgcgtatcatattgctcttaaaggacgaatggtgttagagcgtatccgttcacagaagaatactgctatcaaaaataccgactggctttacgcgattcaggaggagcggaat

SEQ ID NO: 676 - DNA, 3729 bp, synthetic construct
  misc_feature 1..3729: note = Sequence codon optimized for E. coli expression
  source 1..3729: mol_type = other DNA
atggttgccttcgttgatgaattcgtcggacagtatccagtttcaaagacgctgagatttgaagcgcggccggttccggaaaccaaaaaatggcttgaaagcgatcaatgttcggttctctttaacgatcagaagcgcaacgagtattacggtgtactgaaagaactgctggatgattattaccgcgcatacattgaggatacccttgccgcgtttactttagataaagcattgctggagaacgcctatggcttgtactgtaatcgcgataataatgcgttctcttcttgctgtgaaaaactgcgcaaagacctcgttaaagcttttgcgaatttaaaagattacctcctcgggagtgatcaattaaaagacttagtcaaactgaaggcaaaagtagccgacagtgcgggaaaaagcaaaaaaaagattgaggtagactcacgtctgttagcttggttgaaaaacaatgcgaagtatagtgcagaagatagagttaaatactgcgaggcaatagaagcatttgaaggttttgtaacctacctgaccaactataagcaggcccgagaaaacatgttttctagtgaagataaaagcactgccatcgcgttccgtgttatagatcaaaatatggtgacctattttggtaacattcggatttatgaaaagataaaagccaagtatcctgagctgtattcagcattaaaaggattcgagaagtttttttacccggcaggctattcagaaatcctgtctcaaaacaaaatcgacgagtataattacaaatgtattggacgcccggtcgaagacgccgactataaaggagttaacagtatcattaatgaatatcggcagaaaaaagggattaagagccgtgagcttcccgtaatgtctatgctttacaaacaaattctgagcgatcgtgacaacgattttatgagtgaggttattacctctaatgaagaagcaattgaatgcgcgaaagctgggtataaaaaaagctatattctgttcaatgaacttctgcagctgtttaacaacagttttatagaagaaaactacgagtatatctacatcaagacacaaccgttaactgaattgagccagagtctctttggcgattggtctgtgctgcggaatgcactggacaatgccaaatacgataaagaaataatcaacctcgcggagctggttcggtatttctcagagtattgccagattctggatgcggacgatgcggtcaaaattaagaacaaatttattttagaggactactttgtgcaagacacactggaagcggcactcccagatctggataaaatcacgcagtataaaacctaccttgacaacatgttacaagttatacggaagtaccgtctttttagcatgtataatggtagaaaaaagttagatgtacctgagaaaggcatggacttctctaacgaatttaacgatatttatgataagctttcggaattttcaattctgtatgatcgtatccgcaattttgcaactaaacgtccttactccgatgaaaaaatgaaactgtcattcaatatgcctacaatgctcgctgggtgggactataataatgagacagcaaatggatgcttcctgttcataaaagatggcaaatactatctgggcgtcgctgacagcaaatccaaaaatattttcgatctgaaaaaaaatccacacctgtgggataagtattcgttcgaaaacgccttttataaaataaaatataaacagataagcggcgctgctaaaatgctgcccaaaactttcctgccttccaaaggtaaaccgctgtctgaggaaaaaaaaaaaaaatatgggcatttagtgacggacagaattatagaaatacgtgataatggtctctatatgaagtcagcaggggatcgaaaggcagttatagaatggatcgattttatgaagtcagcaatcgccattcatccagagtggaacgagtattttaagtttcattttaaaaacactgaagaatatgcttcagcaaacgaattttacgaagatatggacaagcagacgtattccctggagaaagttaagataccagccgcatacgttgacgaacttgtgtcccagcacaaattgtacctgtttcaactgtataccaaagattttagcgataaaaagaaaaaaaagggaactgataatttacataccatgtattggaatggggtgttcagtgatgaaaatctcaaagccattgcggagggtacgaaaccgataattaagctgaatggtgaagccgaaatgttcatgcgcaatccatccattcctagaaaaattacccatgaacgcaacaaaccaatcgcgaataaaaacccattgaataacaaaaaagaaagcttattctcctatgatctcatcaaagataaacgatacactgaacgcaagttttattttcattgccctattactcttaatttccgagcagcgaaaccgacgaagtataatgaaaaaatcaaccgttttgtggaaaataatcccgacgtatgcattattggtattgatcgcggggaacgtcatttactgtattacacagtgattaatcaaacaggtgatatattagagcaaggctctttaaataaaatttcctcctcgtatacaaataacaagggggagaaggtcaacaaagaaacggactatcatgcgctgcttgatcgcaaagagaaaggaaagcatgcggctcagcaggcatgggagaccattgagaatattaaagagctgaaagcaggctatttatcacaggtagtatataaattgacacggttaatgctcaaatacaacgcggttatcgttctggaaaatctgaacgttggctttaagcgtggccgtaccaaagtagagaaacaggtttatcagaaatttgaaaaagctatgattgataaacttaattatctggtgtttaaggaacgcgggtatgaaatgaacggctcgtacgcgaaaggtctgcagcttactgacaaatttgagagctttgaaaaaatcgacatagataagcagacgggttgcatttattacgttatacaatcttacacctctcacattgatccgaagaccgggttcgttaatttattgaacagcaaattgaaatacgaaagcgtatcaaaagcccaggaaacaatccggaaattcgatcgtatttcctataatgctaaggcagattatttcgaattcagcttcgattacgggaaatttggtatcgacatgttccgcaatgagtgggttgtttgcacctgtggggattggcggtgggaatactcagcaaaggatcgcgaaactaaagcgtattgcgtaaccgatcgcctgaaggaattatttaaaagtcatggaatcgattatgtcggtggagaaaatattgttagcaagatcgcggatgtagcagacaaaagatttctgagtactctgctgttttatctccgattagtttttaaaatgcgttatactgtgagtggtacagataacgaaaacgattttatactgtctcctgtcgagtatgccccaggcaaattttttgattcacgcgaggctgcagctactgaaccgatgaatgccgatgcaaatggagcgtaccatatagctctgaaaggcttaatgacgatccgtggtatagagaatgggaaattgcataaattcggaaaggggggtgaaaaagccgcgtggtttaaatttatgcagaaccaggaatacaagaataatggg

SEQ ID NO: 677 - DNA, 3903 bp, synthetic construct
  misc_feature 1..3903: note = Sequence codon optimized for E. coli expression
  source 1..3903: mol_type = other DNA
atgaataacggtaccaataactttcaaaatttcatagggatatcctcccttcagaagactttgagaaatgcgttgatccccacggagacaacacagcagtttatagtgaagaacggaataattaaagaagatgaattgcgtggggagaaccgccaaattctgaaggatataatggatgactattatcgcggcttcatcagtgagacgctgtcgagtatagacgacatagactggacttccttattcgaaaagatggagatccagttaaaaaacggggacaacaaggacacgcttataaaggaacaggcagaaaaacggaaggccatctataagaaatttgccgatgatgaccgctttaagaatatgttttcagcgaagttgatatcggacatactgcccgagtttgtaatacacaacaacaattatagtgcatcggaaaaggaagaaaagacccaggtgattaagttgttcagtagatttgctacgtcattcaaagattatttcaagaatcgtgctaattgctttagcgctgatgacatttcaagtagttcttgtcatagaatcgttaatgataatgcagagatatttttcagtaacgcgttggtatatagacgcatcgtaaagaacctttcgaacgacgatataaataaaattagtggggatatgaaagactcacttaaggagatgtctttagaaaagatttattcatatgagaagtacggcgaattcatcacacaggagggaattagtttttataatgacatttgcggaaaggtgaacagttttatgaacctgtactgtcaaaaaaataaggaaaataagaatctgtataagctgcgtaaactgcacaaacagatactgtgcattgcggacacttcatatgaagttccatataaattcgaatccgacgaggaggtctatcaatctgtaaacgggttcctggacaacatcagctcaaaacacatcgtagaacggttacgtaaaattggcgacaattataatgggtataatttggacaaaatatacatcgtttcgaagttctatgaacttgtcagtcaaaaaacctaccgtgattgggaaactataaataccgcccttgagatccattataataacatcctgcctggtaacggaaaatccaaagctgacaaggtaaagaaagctgttaaaaatgatcttcagaagtcgattacagagatcaatgaattggttagtaactataagttgtgtcccgatgacaacataaaggcagagacctatattcacgaaattagccatattctgaataatttcgaggctcaggagctgaaatacaatcccgagatacacttggttgagtcagaattaaaggcgtcagaattaaaaaatgtacttgatgtcataatgaatgcctttcattggtgcagcgtattcatgacggaagagcttgtagataaagataacaatttctatgctgaattagaggaaatttatgatgaaatctatccagtgatcagtttgtataacctggtgcgtaattacgtaactcaaaaaccatactcgacgaagaagattaagctgaacttcggcataccaacattagccgatggttggtcaaagagcaaggagtatagcaataacgcgatcattttaatgcgggacaatctttattatttaggaatcttcaacgccaaaaacaagccagataagaagatcattgagggcaatacatccgaaaacaagggagattacaaaaaaatgatctacaacttgctgcccggacctaataaaatgatacctaaagtatttttgtcaagcaagacgggcgttgaaacttacaaaccctcggcgtatatcctggagggctacaagcaaaacaagcatttaaaatctagcaaggatttcgacattaccttttgccgcgatctgattgattattttaaaaactgcatcgctattcatccagagtggaagaatttcgggttcgacttcagcgacacatctacatatgaagatatatctggtttttatcgtgaagtagaactgcaaggttacaagatcgactggacgtacatcagtgagaaagatatcgatctgttacaagagaagggccaattgtacctgtttcagatctacaacaaagatttcagcaagaagtctaccggaaatgataacttgcacaccatgtatcttaagaatcttttttccgaagagaacttgaaggacatcgtattaaagcttaatggcgaagctgagatcttctttcgtaaatcaagtataaaaaaccccattatacacaagaaagggagtatcttagttaaccgcacatacgaagcagaggaaaaggaccaatttgggaatattcagatagtgagaaagacgataccggagaacatttaccaggagttatacaagtacttcaacgacaagtctgataaagagctttcagatgaagctgctaaattgaagaatgtggtcggacatcatgaagcggccaccaatatagtcaaagactaccggtatacttatgacaagtattttctgcatatgccgataactattaattttaaggccaataaaacctctttcatcaatgaccgtattttgcagtatattgccaaagaaaaggatctgcatgttattggcattgaccgtggggagagaaaccttatatacgtgtcagtcatagatacgtgcgggaatattgttgaacagaaatcatttaacatagtaaacgggtatgattaccagattaaactgaaacagcaggaaggtgcgcggcaaatcgcgcggaaagagtggaaagagattgggaaaattaaagaaattaaagaggggtacctgtcgttggtaattcacgaaatctcgaagatggtaataaaatacaacgccattatcgcaatggaagacctttcttacggcttcaagaaaggccggtttaaggtggagcggcaagtctaccagaagtttgagacaatgcttataaacaaacttaactatcttgtgttcaaagatatctcaattacggagaacggaggccttttgaagggatatcaacttacttatatcccggagaaactgaagaacgtcggccatcagtgtggatgtatcttttatgttccggcggcctatacctctaagatcgaccccacaacaggttttgtaaacattttcaagtttaaagatcttaccgttgatgcaaaacgtgagtttattaagaaattcgactccattagatatgattccgaaaagaatctgttttgttttacgtttgactacaataacttcattacacagaacaccgtaatgtcgaaaagcagttggtccgtatacacgtacggagttcggattaagagacgttttgtaaacggtcggtttagtaacgaatccgacacaatagatattacaaaggatatggaaaaaacacttgagatgaccgatattaattggcgcgatggccatgacctgcgtcaggatattatcgactatgagatagtgcagcatattttcgagatatttcggcttactgtgcagatgcgcaatagtcttagcgaattagaagaccgggattatgatagattaatcagtccggtccttaacgaaaacaacatcttttacgattcggcgaaggcgggggatgcattgcccaaagatgcggatgccaatggggcatattgcattgctttgaaaggactttacgaaattaagcaaattactgagaattggaaagaggatggcaaattcagtcgggataagctgaaaattagcaacaaggattggtttgatttcatccagaataaacggtatttaaaacgtccggcagcgactaagaaggcggggcaagctaagaagaaaaaggggtcgggtcctgctgccaagagggtcaagttggacggcagtggtcatcaccatcatcatcattaa

SEQ ID NO: 678 - DNA, 3705 bp, synthetic construct
  misc_feature 1..3705: note = Sequence codon optimized for E. coli expression
  source 1..3705: mol_type = other DNA
atgggggaagttaagcttactaagttggcagaattctacgacgtgtacttaaagtttcgtaaaaaccccaaagatgatggtttgcaaaagcaactgaaagatttacaagcggtattacgcaaagaaatcgtaaaaccaatagggaatggcggcaaatataaagcgggttacgacagattatttggagcaaaacttttcaaggacggtaaggaattaggcgacttggctaaatttgtaatcgcccaggagggcgaaagctccccgaaattagcgcacttggctcacttcgaaaagtttagtacgtatttcactggttttcatgataatcggaagaacatgtatagcgacgaggacaagcatacagctattgcttatcggttaatccacgagaaccttccgcgcttcatcgacaatctgcagattctggcgacgatcaagcaaaagcacagcgctctgtacgaccagattataaacgaattaactgcgagtggcttggatgtcagtcttgctagccacttggatggctatcataaactgctgacccaagaggggattactgcttataatactttactggggggaataagtggagaagcaggcagcagaaagatacaaggcatcaatgaactgataaacagtcatcataaccaacactgtcataaatcagaacgtattgcaaagctgcggcccttacacaaacaaattttatcggacggtatgggcgtgtcctttcttccctcaaagtttgctgacgatagcgaggtttgccaggcggtcaacgaattttaccggcactatgccgacgttttcgctaaggtccaatccctgttcgatggatttgacgattaccaaaaggatggaatttacgtggagtataaaaatttaaatgagctgtcaaaacaagcctttggcgattttgcgcttctgggtagagttctggatggttattacgtagacgtggtcaatccggagtttaacgaacgctttgcgaaagcgaagaccgacaatgctaaagcgaagcttaccaaagagaaagacaagtttattaaaggagtccattcgcttgcgtctttggaacaagctattgaacattacacagcacgtcatgacgatgaatcagttcaagcggggaagctgggccaatattttaagcatggactggctggagttgataatccgattcaaaagatccacaacaatcactcgactattaaaggctttttagaaagagagcggccagctggtgagagagccttacccaaaattaaatctgacaaaagccctgaaattcgtcagcttaaagagcttcttgataacgcgttaaacgtcgcgcactttgcgaaattgttgactacaaaaaccactttacataatcaggacggcaacttctatggggaatttggcgcattatatgacgaacttgcgaagatcgctactttatataacaaagtgcgggactatcttagtcagaaaccgttcagcacagaaaagtacaagttaaattttgggaacccaacgttgcttaatggttgggaccttaacaaagaaaaggataactttggtgtgatattgcagaaggacggctgttattacttggcattactggataaagctcacaagaaggtctttgataacgccccaaatactggtaagtcagtttaccagaagatgatttataagctgttacctggtcctaacaagatgttgccgaaagtattcttcgccaaaagcaacctggattattataacccgagcgcggagctgttagacaagtatgcccaaggcactcataagaaaggggataatttcaatttgaaagattgccatgcactgattgattttttcaaggcgggaattaataagcatccggaatggcagcatttcgggtttaagttttctcccacgtcctcgtaccaagacctgtctgacttttaccgggaggtggaacctcaaggataccaagtaaaatttgtcgacataaatgcggactatatcaacgagcttgtggaacaaggtcaactgtatcttttccaaatctataataaggacttttcaccgaaggcgcacgggaagcctaacctgcacactttatacttcaaggcgttattctcggaggacaaccttgtcaatccaatctacaaacttaatggggaggcggaaattttttaccggaaggcctctcttgatatgaatgaaacaacgatacaccgggctggagaggttctggagaacaaaaatcctgacaatcctaagaagagacagttcgtttacgatatcattaaggataaacgttatactcaggataagttcatgctgcacgttccgataactatgaattttggggtgcagggtatgacaattaaggagttcaataaaaaagtcaaccagagcatacagcaatatgatgaagtgaacgtgattgggattgaccggggcgaaagacatctgttgtatctgactgtgattaatagcaagggcgagattctggaacaaagatcccttaatgacattacgaccgcgtctgccaacggtacgcaaatgacaacaccctatcacaagatattagacaaacgtgagatcgagagacttaatgctagagtaggctggggagagatagagacaatcaaagaactgaaatcggggtatctgtcacacgttgttcaccagatctcacagctgatgttgaaatacaacgcaattgtagtattggaggacttaaattttggctttaagcgtgggagattcaaagtcgaaaaacaaatataccagaattttgagaacgcccttataaaaaagttgaatcatctggtcttaaaagacaaggctgacgacgagattggttcttataagaacgcccttcagttaaccaacaactttacagaccttaagtctataggtaaacaaacgggattcttattctacgtaccggcatggaacacgtcaaaaattgatccggagacgggattcgtagatctgttgaaaccgcgttatgaaaatatcgcacagagtcaggcttttttcggtaaatttgacaagatatgctacaatgccgaccgtggttattttgaattccatatagattacgccaagttcaacgataaggcgaaaaactcccgccaaatctggaaaatctgcagtcatggcgataaaagatatgtgtatgataagacggcgaatcagaacaagggagcgacaattggagtaaacgtcaatgacgaattaaagagtttgttcacgagataccatattaatgacaaacaaccgaacctggttatggacatttgccaaaataacgataaggagtttcataagtcgctgatgtacttattgaagaccttgttagcccttcggtatagtaacgcgagttctgacgaagactttattttaagccctgtagccaatgacgagggggtcttcttcaatagtgcgttggccgacgatacccaaccgcaaaacgccgatgctaatggggcctatcacatagcacttaaaggcctttggcttttaaacgagctgaagaactcagatgacttaaacaaagtcaagctggccattgacaaccaaacctggttgaattttgcgcaaaatcgtaaacgtccggcagcgactaagaaggcggggcaagctaagaagaaaaaggggtcgggtcctgctgccaagagggtcaagttggacggcagtggtcatcaccatcatcatcattaa

SEQ ID NO: 679 - DNA, 4215 bp, synthetic construct
  misc_feature 1..4215: note = Sequence codon optimized for E. coli expression
  source 1..4215: mol_type = other DNA
atggagaagtctttgaacgactttatcggcctttattcagtctctaaaactttgcggtttgaattaaagcccgtgtccgagactttagagaacatcaagaagttccacttcctggaggaagataaaaaaaaggctaatgactataaggacgtgaagaagattatcgataactaccacaaatattttatagacgatgttcttaagaatgccagttttaattggaaaaaattagaagaagctataagagagtataataaaaacaagtctgatgactcggccttagtggctgaacagaaaaagttgggtgacgccattctgaagcttttcacctcggacaagcgttataaagcacttacagccgcgacgcctaaggaattgttcgagtccatcctgcccgattggttcggggagcaatgtaatcaggaccttaataaagccgccctgaaaaccttccaaaaattcaccagctactttacgggatttcaagagaaccgtaagaatgtatattcagccgaggccattcccacggcagtgccatatcgcatagtcaacgacaacttcccaaagttcctgcaaaacgtcctgatattcaaaacgattcaggaaaaatgcccacagattatagacgaagtagaaaaagagctgtcatcgtatttgggaaaggagaaattagccggaatattcacgctggagtcgtttaataaatatttggggcaaggcggcaaagagaatcaacggggcattgatttctacaaccagatcattggtggggtcgtcgaaaaagaagggggaatcaacctgcgtggagtaaaccagtttcttaatttgtattggcaacaacatccagattttaccaaagaggacagaagaatcaaaatggtacccttatataaacaaatattatctgaccggtcttcccttagttttaaaattgagagcatagagaacgacgaggagttaaaaaatgcacttcttgaatgcgcagacaagttggaattaaagaatgacgagaagaagtcaatctttgaggaggtctgcgatttattttcgtccgtgaaaaatcttgatctgagcggtatatacattaaccgcaaggatattaatagtgtatctagaatactgactggtgattggtcgtggctgcaaagcagaatgaacgtctacgctgaagagaagttcaccactaaagcagaaaaagcgcggtggcaaaaatccttggatgatgagggagagaacaaatcaaagggtttttattcattgactgatttaaatgaggtcttggagtactcatcggaaaatgttgcagaaacggacattcgtattacagattattttgaacatcgctgtcggtattatgttgataaagaaacagaaatgtttgttcaaggatcagagcttgttgcattatctctgcaagaaatgtgcgatgatatactgaagaaacgcaaagcaatgaacaccgtgctggagaatcttagctcggaaaacaagttgagagagaaaacagatgatgtcgcggttataaaagagtatttagatgctgttcaagaacttctgcaccggataaagcccctgaaagtgaatggtgtaggagattctacattttactcagtgtacgactcgatttactcagcactttcagaagtcatctccgtttacaataagacacggaattatattaccaagaaggccgcatctccggagaaatataaacttaattttgacaatcccacacttgccgatggttgggatttaaacaaggaacaggcaaatacgtctgtgatcctgcggaaagatgggatgttttacttaggcataatgaatccgaagaacaaaccaaagttcgctgaaaaatatgactgcggtaatgaaagctgttacgagaagatgatatataagcaattcgacgcaaccaaacagataccgaaatgctcaacgcagaagaaagaggtccagaaatactttttaagcggagcaacagaaccgtacattcttaatgataagaagtcattcaaatctgagttgatcataactaaggatatttggtttatgaacaaccatgtgtgggatggcgagaaattcgtcccaaagcgggataacgagactagaccaaaaaaattccagataggatacttcaagcaaacaggggattttgatggatataagaatgctttgtctaactggatttcgttctgcaagaactttttgcaatcctatctttcagcaaccgtgtatgactacaatttcaagaattccgaggagtacgagggtttggacgaattctacaattacctgaatgccacctgctataaacttaactttattaacatcccggagaccgagattaataaaatggtatcggaagggaaattgtacttgtttcagatctacaataaagactttgcctccggctccactgggatgcctaatatgcacaccctttattggaagaatctgttttcagatgaaaacttaaaaaacgtatgtttgaaactgaacggggaggccgaattgttttatcgtccagctgggataaaagagccggtaatacacaaagaaggttcatatctggttaaccgcacgacggaagacggggaaagcattccggagaaaatttactttgagatatataaaaacgccaacggaaaattagaaaagctgagtgacgaagcacagaactatatttctaatcatgaagtggttataaaaaaggcgggacacgagattatcaaagaccgccactacaccgagcccaaattcctgtttcatgtaccattgaccatcaacttcaaggcttcaggcaattcgtattctatcaacgaaaatgtgcgtaaatttttgaaaaacaatcctgatgttaatattatcggcctggatagaggcgagcgtcacttgatttatttgtcacttataaatcagaagggagaaattattaagcagtttacctttaacgaagttgagcgtaataagaacggccgtacgattaaagttaactatcacgaaaagttggaccagcgtgagaaagagcgcgacgcagccagaaagtcttggcaggccataggcaaaatagcggaattaaaagagggatatttgtctgctgttattcatcagctgacaaaattaatggtcgagtataacgctgtggttgtaatggaggatcttaatttcggttttaagagaggacgtttccatgtggaaaaacaggtgtatcagaagttcgaacatatacttatagacaagagtaactaccttgtatttaaggatagaggattaaatgaaccaggaggtgtattaaacgggtatcaaatagctgggcaattcgaaagctttcagaaacttggtaaacaaagtggtatgctgttttacgttcccgctgggtatacctcaaaaattgatcctaagaccggatttgtctccatgatgaattttaaggatttaactaatgtgcacaagaagagagattttttctccaagtttgacaatatacactacgatgaggctaacggtagtttcgtttttacctttgattataagaagttcgatggtaaggcgaaggaggaaatgaaacttaccaaatggtccgtatattcacgcgataaacggatagtttactttgccaaaacgaaatcttatgaagatgtccttcctacggaaaaacttcaaaagatcttcgagtcaaacggaatcgactacaaatctggtaataacatacaggattctgtgatggcgattggcgctgacttgaaagaaggcgcaaaaccctcgaaggaaatcagcgacttctgggatgggcttctgtcgaatttcaaacttatattgcagatgagaaatagtaatgcgcgcacgggagaagattacataatcagccctgtgatggctgatgatggtaccttctttgattcgagagaagagttcaagaaaggtgaggatgccaaattacctcttgacgctgatgcgaacggtgcgtaccatatcgcattgaaaggactgtccttaattaataagatcaacctttctaaagatgaggagctgaagaagtttgacatgaaaatttccaatgcggattggttcaaatttgcgcaagagaagaattatgcaaaaaaacgtccggcagcgactaagaaggcggggcaagctaagaagaaaaaggggtcgggtcctgctgccaagagggtcaagttggacggcagtggtcatcaccatcatcatcattaa

SEQ ID NO: 680 - DNA, 4146 bp, synthetic construct
  misc_feature 1..4146: note = Sequence codon optimized for E. coli expression
  source 1..4146: mol_type = other DNA
atgaaaaccattgaaaatttctgtggccaaaaaaatggatattcacgttctataacgttacgtaaccgtttgataccgattggcaagacggaagaaaacatcgagaagttgcaattattggacaacgatataaaacgttcgaaggcttatgttgaagtcaagtctatgattgatgactttcatcgtgccttcattgaggaggttttatccaaagcgaaattggaatggggcccgttgtacgatctgttcgacctttttcaaaacgaaaaggacaagcataaaaaatccaagataaagaaagaattggagaccatacaaggggtcatgcgtaagcagattgtaaaaaaattcaaggacgatgatagattcgacaaactttttaaaaaggagatccttacagagttcgtgccaactgtaattaaagctgacgagtccggcacaattagcgataaacgtgctgccttggatgtattcaagggttttgcgacctacttcaccggattccatcaaaaccgtcaaaacatgtattctgaggaggctaaagcaaccgcgatcagtaaccgtatagtgaatgagaacttcccgaagttctatgccaacgtaaaggtatttgaatgtttacagaaagagtacccggcaattatcacggagacagaggaagccctttccgagattttgaatggaaagaaattagcagacattttttccgcagacggttttaattcagtcttaagtcagagtggcatcgatttttataataccattattgggggtatagccggagaggcggggacccaaaagttgcaggggatcaacgaaaaaattaatttggcgcgccaacagctgcctacagaagaaaaaaataaattgaagcgtaagatgtcggtgttgtacaaacaaatactttctgaccggtcaaccgcgagctttatccctatcggttttgagtcaagcgatgaagtctatgagtctgtaaaacaattcaaggagcagagcttagacaacgtcatatccgctgctaaggaactgttcgaaaaaagtgactacgatctgtcgcagatttatgtacccgcaaaggaagtaactgatttcagcttaaaactgtttggcaactggagcatcctgcatgacgggttgtttttgatagagaaagataattccaaaaaaaccttcactgagaagcagatcgaaaacttgcgtaaagaaatagccaagacagactgctccttggctgacctgcagaatgcatacgagcgttgggccaaggagaacgacgttaaggccgaaaagacggtgaaaaactattttaagatcgcggaattacgtgcggacggcaaaagtcgggagaaaacttcagtggagatacttaacaagatagaatccacttttgagaagatcgacttcgaaaagcgcgataatctgatcaaagaaaaagaaactgcgaccccaattaaagaattcttagacgaagtccaaaacctgtatcactaccttaagttggtggactatcgtggagaggaacagaaagatactgacttctattcgaagtacgatgagatccttcagactttgtcggaaattgttcccttgtacaacaaagtccgtaacttcgtcactaagaaaccaaacgaagtaaagaaagtcaaattgaactttgacaatgtttcgctggcgaaaggctgggatgtcaataaggagtctgactatacatgtatccttctgcgtcgttcaggcttgtattatcttggggttctgaatcccaaagataaacctaagtttgattcagagaacaacggggagacttcaatcaacaagaatgactgctatgaaaaattggtatataaatactttaaggatgttaccaccatgataccgaaatgctctactcagctgaacgatgtaaaacaacattttaaaaacagtaatgaagattacatcttggaaaataacaactttattaagcccttagttataagtaagcgcatctttgacttgaataacaagactttcgatgaaaaaaagatgtttcagattgattattatcgcaacaccggcgatcttaagggctacaccgaagccgttaaagactggatcagtttctgcatgacgttcgtacactcctacaaatcgacttgcatttatgactttagtagcttaggtgactgctcccagttcaaacaggtcgatcaattctataaggaaattaacttgcttttgtacaaaatatggtttgtaaacgttaccgccgagaaaataaatagtctggtagacagtggtaagctgtttctgtttcagatctacaacaaagattattcgaccggcaaggacggaggaaatggtagcacaggcaaaaagaacctgcatacaatgtattgggagaatttgttttccgaggagaatttgcgggacgtgtgcttaaagcttaacggcgatgccgaactgttttggagagacgcgaatccagatgtgaaagatgtatgtcacaaaaagggttccgtcctggtgaaccgcacgactagtgatggcgagaccataccagaagagatatatcaggagatttacaagtttaaaaaccctaataagcaagaaaaaagcttcaagctgtccgacacagcaaaagaactgttagactctggtaaagtcgggttcaaagaagcaaaatttgatataattaaggaccggcacttcacccagaagacatacctgttccactgcccgataaccatgaacttcaaggcgcccgagattacggggcggaagtttaacgagaaggtccaacaggtcttaaagaataatcctgacgtcaaagttattggcttagatcgcggagagcgtcatctgatctatctttccctgatcaatcagaaaggtgagattgaacttcagaagacgttaaatcttgtcgaacaggttagaaacgataagactgtttcagtaaattatcaagaaaagttggttcaaaaagaaggcgaacgcgggaaagcgagaaagaactggcagactatctctaacatcaaggaattaaaagaggggtacttgtcgaatatagtacacgaaattgccaaattaatggtagagaataacgcgatcgttgtgatggaggacttgaacttcggcttcaagcgggggcggtttgcggtggagagacaagtttaccaaaaattcgagaatatgctgatagagaagcttaactacttagtctttaaagataaaaaagtggcagaacccggcggagtcctgaatgcataccagcttaccgacaaagttgcaaacgtgtcagacgttgggaagcagtgtgggtggattttttacattccagcggcctacacgtctaaaatagaccctaagacaggatttgccaacttattttatacagcagggcttaccaacatagaaaagaagaaagatttcttcgacaagttcgatagtattagatatgaccgcaaaacagattcattcgtctttacttttgattatagcgactttggcgacaatgctgactttaagaaaaagtgggagttatactctagaggggaacgtcttgtcttttccaaagccgaaaaatctgtggttcacgtgaacccgacagaaaacctgaaggctttattcgataagcaaggaattaactggtcgtcagaggataacattatagaccaaatccaagccgtacaagctgaacgtgaaaattgcgcattttacgacggcctgtatagatcttttacggcaatcctgcagatgcgtaatagcgtacctaactccagtaaaggcgaagacgattatcttatctcgccggttatggcggaggatggctctttttatgattcgcgcgaggaggcagaaaagggtaaaactaccgatggaaaatggatatccaaattacccgtagatgcagacgctaacggtgcatatcacatcgccttaaaaggattgtaccttcttcagaacaacttcaatttgaacgaaaacggatatatagaaaacatcagtaacgccgattggtttaaattcgtacaggagaaggaatatgccaaaaaacgtccggcagcgactaagaaggcggggcaagctaagaagaaaaaggggtcgggtcctgctgccaagagggtcaagttggacggcagtggtcatcaccatcatcatcattaa

SEQ ID NO: 681 - DNA, 4035 bp, synthetic construct
  misc_feature 1..4035: note = Sequence codon optimized for E. coli expression
  source 1..4035: mol_type = other DNA
atgtcaatttatcaggaattcgtcaataagtattcgctgtcaaaaactcttcgtttcgaattgattccacagggcaaaacgttggaaaatataaaagcaagaggtttaatcctggacgacgagaaacgggcgaaagattacaaaaaagcaaagcaaattatagataagtaccatcaattttttattgaagagattctgtcctctgtttgcataagtgaagatttattacagaactacagcgacgtgtattttaagttgaaaaaatcagacgatgataatttgcagaaggacttcaagagcgcgaaagatactattaaaaagcagatctcgaaatacatcaacgattccgagaaatttaaaaacttgttcaaccagaatttaatcgacgctaagaagggtcaagaatctgatttgattctgtggctgaaacagagtaaggataacggcatagagttgttcaaagcaaacagtgacattactgatattgatgaggccttagagatcatcaaatcatttaagggttggacgacatatttcaagggcttccatgagaatcggaaaaacgtctactccagtaacgatatacccactagtataatttaccggattgttgatgacaacttacctaaattcctggagaataaagccaaatacgagtccttaaaggacaaggcccccgaagccattaattatgagcagataaaaaaggacttggcggaagagcttacttttgacatcgactacaaaactagtgaagtaaatcaacgtgtcttttcgttagatgaagtgtttgaaatagcgaattttaataactatttgaatcagtcgggtatcacgaagtttaacaccatcatcggtgggaaattcgttaatggtgagaataccaaacgcaaaggcattaacgagtacataaacttatatagtcagcaaataaatgacaaaacccttaaaaagtacaagatgtcagttctgtttaagcagatcctgtccgacacggagagtaagtcatttgttatagataagctggaagatgattcggacgtagttactaccatgcaaagtttttacgagcaaatagcagctttcaagacagtggaagaaaagtcaataaaagagacgttatcgcttctgttcgacgatttgaaggcacagaagttggacttatcaaaaatctactttaagaatgataagtcgttgaccgacctttctcagcaggttttcgatgactacagtgtaataggaaccgccgtactggagtatattacccaacaggttgctccaaaaaatttggataatccgagtaagaaagaacaagatttaattgcgaagaagactgagaaggcgaagtatttatcactggaaaccatcaaattggcattagaggagtttaacaaacatcgggatattgacaagcagtgtcgctttgaggaaatattgtctaacttcgcggctatcccaatgatatttgatgaaattgcccaaaacaaggataacttagcacagatcagtataaaatatcagaaccagggaaaaaaagatttgcttcaagcaagtgccgaggaagacgtaaaggcgataaaggatcttttagatcaaaccaacaatttattacacagattaaaaatttttcacatttcccagagtgaagataaggcgaacatattggacaaggacgaacatttctatctggtatttgaagaatgctactttgaactggcgaacatcgttcctctgtacaataagatacgtaattacataacccaaaagccatacagtgacgaaaagtttaaacttaacttcgagaattccacgttggcctcgggatgggacaaaaacaaggagtccgcgaacactgcaattttattcataaaagacgacaaatattatctgggtataatggataagaaacataataagatttttagtgataaagccatagaggagaacaaaggagaaggctataaaaaaattgtgtataaacagattgcggatgcgagcaaagatatacaaaacttgatgataatagacggaaagactgtatgcaaaaaaggtcggaaagacagaaatggtgtaaatcggcaattattgagcttgaaacgcaagcacttaccagaaaatatttaccggattaaggaaaccaaatcttatttaaaaaatgaggctcgcttttcccgtaaagatttgtatgacttcatagactattacaaagacagattggactactacgattttgaattcgaactgaaaccgagtaacgagtatagtgacttcaacgatttcacgaatcacatcggctcgcagggttataaattaacttttgagaacataagccaagactatatcaatagtttggtgaacgaaggaaaattatacttatttcagatctactctaaggactttagtgcttacagcaaggggcggccgaatcttcacactctgtactggaaggcgctttttgatgagcgcaacctgcaagacgtggtttataaacttaatggggaagcggagttattctatcggaaacagtctataccaaagaaaatcacgcacccggccaaggagactattgcaaataaaaataaggataatcctaaaaaagagtcggttttcgaatatgaccttattaaggataaacggttcactgaggataaattcttttttcattgcccaatcacgattaatttcaagagctcgggagccaataaatttaatgacgaaataaatttacttctgaaagagaaagccaacgatgtacatatattgtctattgaccgtggcgagcggcacttagcgtattatacccttgtggacgggaaggggaatattattaagcaggataacttcaacattatcggtaacgaccgcatgaaaacaaattatcatgataagttggcagctatagagaaggaccgtgattcagcccgcaaggattggaaaaagatcaacaatatcaaggagatgaaggaggggtatctgtcccaggtggtgcacgaaatagcgaaactggttatagaatacaacgcaattgtcgtcttcgaagatttgaactttggtttcaagcgtggtagattcaaggtagagaaacaagtttaccagaaacttgagaaaatgttaatcgaaaagcttaattatctggtcttcaaggataacgaattcgataaaactggtggcgttttgcgtgcctaccagctgacggcccctttcgaaacttttaagaagatgggaaagcaaacgggaattatatactacgttccggccggttttacgtctaagatctgtcctgtcaccggctttgtgaaccagctgtatccaaagtatgagagcgtcagcaaaagtcaggagtttttttcgaagtttgataaaatttgctataaccttgataaaggttactttgagttttccttcgactacaaaaatttcggcgataaagcggcaaaagggaagtggacaattgcgagcttcgggagccgcctgataaattttcggaacagcgataaaaatcacaactgggacacgcgggaagtatacccaaccaaagagcttgagaaattgttaaaggactattccatagaatatggccatggagagtgtatcaaggcggctatttgcggagaatctgacaagaaattttttgcaaagttgacatctgtcttgaacactatattgcaaatgcgtaatagtaaaacgggtactgaattagactaccttatttcaccagttgcggatgtgaacggcaatttttttgactctcgtcaggcgccgaagaatatgccgcaagacgcggatgcgaacggagcataccatattgggttgaaaggccttatgcttttagatcgtattaaaaataaccaagaaggtaagaaattgaacctggttataaagaatgaagaatactttgaatttgttcagaaccgcaacaataaacgtccggcagcgactaagaaggcggggcaagctaagaagaaaaaggggtcgggtcctgctgccaagagggtcaagttggacggcagtggtcatcaccatcatcatcattaa

SEQ ID NO: 682 - DNA, 4053 bp, synthetic construct
  misc_feature 1..4053: note = Sequence codon optimized for E. coli expression
  source 1..4053: mol_type = other DNA
atgaaagcggaaacaaatcttaccgaacttgttaatctttattctctgcaaaagacgcttcggttcgagttgataccccaaggtgagacattgcaaaatatagagaaaatggggattttaacacaggataatcagcgtaccgacgattatgagaaggtgaagacaatcatcgacgagtatcacaagcgcttcatagaaatatgcttcaaagatttcgtcttagaagacttggacaaataccaagagttgtacatcaccaaaaaccggtctgagcaggaaaacactgagttccagaaactgaaaacaaatctgagaaaacaggtagtgaaccggttcaaagaaaacgataagcttaaacggctgtttagcaaagaatttataaaagaggatcttgtcgaatatctggatggccgggacgaagataaaaccagagtcgagcggtttaaggattttacaacttactttacaggcttcttcgagaatcgtaaaaatatgtattctgatggggaacaatctacggcaatcgcgtatcgtttgatccacgagaatttgcctaaattcatagataacctgtccatatttaacaaaatcgtagagcggaacgagattaagacaaagtttagtaccatcgttaatgacttaaattgccacttacactcgccgatcaactcgattgaagaagtatttacaattgattattttaacaagacattatcacagaagcagatagaggactacaacacaattattggtggtgtttccaaaaataacgaaaaggttcaaggacttaacgaatatataaacctttataaccaacaacaaaaagacaagtcgaatcgcttacccttgctgaaaaaattgttcaagcagattttgtccgatcgggaacccattagttggctgcctgaggagttaagttcagacaaggacatggctaattctgtacttaacttatataaagaagtttacgaaattatatactcaaacgacaatagtttatacaatttgattacgtacatagacaattacgatcttagcaagatctacatttcaaatgaccaatcattgactactttgagtcaaagaatatacaatcgttacgacatttacactttcgctatcaaacaaacccttaaggaactgaatagacaaaaaagaaaggagaatatcgaaaaatatgaggctagaatcgataacctttttgaaaattgcgaaagtttcagcattgaggagctgaacaacatcgtcaaaaacacatacaaagagaatgaggaaattgacacgtccaagaccatagagcagtacttcaaggatttcggggcaatcaacaaggagcatatccagaaagaaaaccttatactgcagcttgagaacgcctttacggtagccaaacctatattagaggcaatcgacgacaataacaagggaatttcacaagataaggatgccgtcgacaagattaagaacttgctggatgtattaaaggatattcagcacttcgttaagccgttgttaggatctaatatcgaagccgacaaggatgaaaatttctacggatccttctcagacatttaccaacgtttggacaaaatcacgcccatttataatatggtgcgtaattatttgacaaaaaaaccttattccgaagagaagatcaagttgaatttcgagaagggcaaccttttaaacggctggatcgactcctacaccgaaaaaagtgataatggaacccagtactctggatatctttttcgcaagctgaatagtatcggtgagtatgactactacctggggatctcgcttgatacgaaattattccgtaatacagacaatgtcgaggaaaatgataagagtgaatttgaacggctggattattaccaattgaagtcacagacattcttcggaaatagttacaagggaaagcaaacttacaataaggacaaagaggatatgatcacgattattgatgattttattgaacgcctgccgaacattcacccacttaaggaacggtcgaaaaataaacccgatacttttaccccaaatcagtacctgacttacttcaaaaactatcaggaggagtacaactgtttattgaaggataagaagtttaaaaacaagaatgaagagttgattaagaacatcatagagaccatcaagtcgataaatcgtttgccgaaagataagataaaggcaataatatcgaagaattatacggtgttctcagagatcatatctgacatccaagacaccctgttgaaagagaagatattcaattacatcagtgtcagtaaaaaggccatggaagctgcggcgaaacgtgagcagaaaactttatacttattcaagattagtaataaagacttatcttacgcggacacccacagcaagggtgatcgtaagagccggggaaccgagaaccttcataccatctattttaagacacttatgagtggggagcagaacgtgttggatattggggccggtgctatcttctaccgtaagaaaaccgagtggctgaagagttcaccgacgcacaaagctaacgaaaaaattcagaataagaatagtcacactaagtccgaatttgaatatggacttatcaaagacaagagatatatagaaaacaaatttctgttccacttgtccttgactttaaactatcagtcaaagggcattaaaaatattaatcctatagttaacaacatgatacggaataaggaaataaagcacatcataggtatagaccggggagagcgtaacctgttgtacttgtctcttattgacctgaaggggaatatagtcaaacagatgtctttaaatgaaataatcaatgaatacaatggtaataagtacaagactgattaccacgatttgttagctaagaaggaggaagaacgtaagaaagctagattgtcatggggaacaatcgaaaatatcaaggaactgaaagatggttatatatcacaggtggtacacataatctcccaaatgatcgtgaaatacaacgccatagtagttcttgaggacctgaacttcggtttcatgcgggggcgtcaaaagattgagaaacaagtataccaaaagttcgagaaaaagcttatcgacaagcttaattactacgtcgataaacaaaagaactccaacgaaattggggggcttttccatgcattacaattgacgaacaagttcgaatccttcaaagacatggagaagcagaacgggtgtctgttttatatacccgcatggaatacgtcgaagattgatcctgtaacagggtttgtaaatatgtttgatacaagctactgcagcgtgaaagaatctaaggtcttcttctcgaaatttgacacgatcagatataatgcgaaagatgatttatttgaattcgcgtttgattacgataactttaccactaaagctcaaggcactaaaactcaatggacgttatgttcatttggtcagcgtatcgaaatctttcgtaacaaagagaagaataacacctgggataacaaagaaatcaatatcaacgacgagttcaaacaattattcaacgaattcaacatcgatattaacataaacgacaacttaaagcaagagatacaaaagcagactagtgcagaatttttcaaacggatcatgcacttaatgaagttgcttcttcaaatccggaattcgataactggcagcaccgaaaaaaacgatgattacataatttctccggtcgcggacgagaacggcgttttcttcgattcgagaaaggtgaacgaaccggataacttgcctatagatgcggatgccaacggcgcgtataacatcgcgcgcaaaggcctttgggtcgtccgccagatacaaaataccaaagacgaagataagataaacttagctataagtaataaaggttggttgaattttgtacaacagaagctgtatcttaatgacaaacgtccggcagcgactaagaaggcggggcaagctaagaagaaaaaggggtcgggtcctgctgccaagagggtcaagttggacggcagtggtcatcaccatcatcatcattaa

SEQ ID NO: 683 - DNA, 3543 bp, synthetic construct
  misc_feature 1..3543: note = Sequence codon optimized for E. coli expression
  source 1..3543: mol_type = other DNA
atgaccaatctgtatccgattgaaaaaaccgtttgttttgaactgcgtccgattggtaataccctggaacatttttataagaatgaaattatcgaaaaagcacagaatcgtagcgatgaatttcgtgagattaaacatctgattgatccgattcataaagagattattgaggaatgttttcaggaactgagcgaaaatagcgaatttacccgtctgctggaaaaatatgaatttaagccgcatgttattaatagcaaaaaaccgctgccgcgtgataaaaagctgattgaagaaaacatttataacaagaaggaaattgtggaaattgtgaaggatacctttcgtcataatcctaaatataagctgatttttagcgataaaaaaatcgacatgctgaaagaatactataaagatgattgtgagaaattcgaactgattagccattttgaagaatttgcaagctattttgaaaagtacgacattaaactgaagaacatttatggttgtgaaggtaaaattagcaatacctgcaaaagcattctgaaccgtctgattaccgataacctgccgattttttactttaacaccaaaaagaatatcctgaccaaagttaaattcagcgcaagctttgaaaatgttaaatacattgataagtttgccagctattttagcattagcggtattgagaaatataacaaaatcattggtaacattaacgatgccgttaataagctgaatcagaaaggtaaaaagtatagctatctgggtaaaatgaaagatatttttgatctggatcagtatagcgatattgtgaaaaagatcagcgatgacaaagagctggttgaaattattaatatttttattgacggtcaggatatcgaagagctgaaaaatacctttagcaatctgaatgataaatacaatctgaagaagatctttgttcgtcgtggtaaagaactggatgatctgctgaaacgtattgattttaaaggtcgtgcacgtctgaccaccagctatgtgaacctgttttatattgatagcattaatcgtaacaaagttaagatttacgaggcaatcagcgttaagattaacgaactggttgatgattacatcaaaaaatatgaagacgttaagtatatcctgacagcaaaatatgatagcggtaccaaaattctgggtcagaatgataagaacattgcaaagattaaggaactgctggaaagcattaaagcaatttatgattttgtttctatttttatcccgaagaaggcagaaaatcgtgataacattgattacgaaaaagtgaacttcgatatctacaataagattaactttgaacgtctgagcattatcaaccagattttcaatcatttcaaagattacttcaccctgaaaaattttagcaccaaaaaaattcgtctgaattttaacgtggaacagctgctgaatacctgggatattgataaaattgacgaaaccctgggtaccatcctgctgaaagaggaagaagaaaaaaccaaatattatctgggtattctgaatagcagcaattatagcaagttcgaatataccgatgttaaagaaaataactatcgtcagatgatttataccagccagagcgaagaagaaaagaataagaactacaagatcagctttaagtatattaatagcgcaaaaattgatgaaatggtggaaaaagatgaaatgtatctgtttcagatttataataaggacttcagcagctatagcaatggtaactataagttaaataccatgtattggaataacatctttgacagcaacaacatcgagaatattatttttaatattgcaggtggtgcaaccattttttttcgtgcaaaaagcctggaacgtcgtgaaacccataaacagggtgaagttctgagcaataaaaataaagataatcagaaaaccaccagcatttttagctatccgctgattaaaaataaacgttataccgaagataaaatcaaactgcatgttccgattgaaattaattgtaatagcaagaatctgaatcagcgtaaactgaactatcgtgttaacaagaatattcagaacctgaaagaagttaatattattggcatcagccgtggtacaaatgatctgctgtatgcaaccgttattaattctaaaggtgagattattgaacagaccagcctgggtaaaattaaaaatgttgtttttgacaagagcattaatgcaacccgtgaaattattagcgattataacaaaattatcgataccaaagagaaagaacgtgaaaatgcaaataatcgtaataaaaccggtgaggaactgaatctggaaaaaagcatcaaagatattaaaaatggttatatcagccaggcagttaatgttattgcaaatctggtgaaaaagtacaatgcaattatcgttttcgaggatttaaatgataagaaaagcgaaaagattgagagcaaaattgaaaaatccatttaccgtaatattcagaatgcagttattaccaagctgagctatctggttgacaaaaaaaagaaagataaattcgccgaaggtagcattctgaatggttatcagctgacctattattgtgaacaggatctggttgaaaaacaggaagatagcgaagaaaaacagaatggtattgttttttatgttagcacctatatgaccaccaatattgatccgaaaaccggttttgttaattgttttagcgttagcctgccgaaaagcattgatggtgttaaggacttcctggaaaaattcaaagagattaagttcaataccaaagaaggctattatgagttcgttgttaattacgaaaacattagcaaatatacccgttattttattggcgaaaaactgagcaaaaaagaatgggttatttgtagctatggtgatcgtattgaagaatctaaagatattaataccggtaaaaccaaatacaagaagattgacctgaccaaagaatttaaatgtctgtttgaaaaattcaatatcggccagggtaaaaaactgaaaaccaacattattaaattcctggaaaatctggatctgggtagcggtctgcaggcaaaaattaagggtaccaatcgttttatcaataaacagagcattcagcaggaagaattttgtcgtgaatttatgcgtctgtttgcactgattctgaaactgcagaatagcgatggtaaagaaagctatattattagcccggttaaagattctgatggtaaattttttgatagccgtaaacataatgaatacagcagcattgttccggaaaatgaaattagcaattcagcatataatattgcccgtaaaggcctgctgattattaatcgtattaaaaaaaccaaagaactggaacgtattgacctgaatctgcgtgatgaatattggctgaattttgttcagaataataataaacgtccggcagcgactaagaaggcggggcaagctaagaagaaaaaggggtcgggtcctgctgccaagagggtcaagttggacggcagtggtcatcaccatcatcatcattaa

SEQ ID NO: 684 - DNA, 4002 bp, synthetic construct
  misc_feature 1..4002: note = Sequence codon optimized for E. coli expression
  source 1..4002: mol_type = other DNA
atgaaaggtgcaaaaatgggttatgagaattttattaataagaatagctgcgttaagaccctggttaatgaactgcgtccgaccgaatggacccgtaaacatattgaagaagatgcaattctgagcgcagatgaactgcgtgcagaagaaagcgataaactgaaaagcattatggatgattattatcgtcgttacatttacaccaaactgagcggtgttagcagcctggattgggatgaactgtttagcattatggaagttgcatataaaagcggtaagaaagacaagaattgtaaagcacagctggaaaaagttcaggaagaaatgcgtggtaagttctacaatgttctgagcgatgatgatatttttaaaatgatgttcagcggtaaattcgttaccaaagttctgccggaatttgttcgtaataataaagaatatagcgcagaagagaaacagcagaaactggataccctgaaactgtttaaaggttttaccaccagcctggttccgttttttaataaccgtgaaaatatttttagcaaaaaaccgattcacagcagcatttgtcatcgtaccgttgatgaaaataccgcaattttttatcagaacattatcagctataagaacattgaagataatgcaccgcaggaaattgaaaaaattgaacatcagggtcgtcagcagctggatgaatggaaactgccggatatttatagctatagcttttataataatgttttaacccagcagggtattgaattttacaacgatatttgtggtattgttaacagccatatgaatctgtattgtcagcagaccaaagaaaaaagcggtcagtatcgtatgcgtaaactgtataaacagattctgagcattagcagcaccagctatgaagttccgtataaatatgaagatgatgcccaggtttatagcagcattaatgaatttgttgaccgcatttttaatagcaattttagcgcaaaagttgaaaaaatgctgggtaaagcagaagaatatgattttgataagatttacattagcagcaaaaactatagcagcatcagcaattttattagcggtaaatggaataccctggatgattgtattcgtcgttattatgaagataataccgttggtaatggtgacaaaaaagaaaaaaaagttgaagagaaagttaaaaaggacagctttcgtagcctggatagcattgataaagttgttgaaatgtatgaaaaacgtggtaaaagcgcaaaagaatatatttaccagattcgtgaaatctatagcgataataagctgtataaatttggtcaggatggtagcgataccgttaaactgattgaaaatgacgcaaaaattgaacgtatcaaatgtgttctggatatgctgctgaataccaatcgttttctggatacctttgcagttggtgatggtgaagcagttgatgttggtttttatagcgaaattgatgaactgaaagaaattattgatggtattgaaccgctgtataatcgtgttcgtaattatgtgacccgtaaaccgtataataagaataagatcaaactgaattttaatagcccgaccctggcagaaggttggagcaaaagcaaagaatatgatgataatgcaattattctgcgtcgtgatggtaaatattatctgggtatttttaatgttaagaataagccggataagaagattatggaaggttatagcggtgatgttggtgatggctatgagaaaatggtttatagcctgctgagcaatattcatagcaattttccgcgtatttttattaaaagcgatgaatgtgagaaaaaatacaagctgagccagtatattatcgatggttatgataatgatcgtcacatcaaaagctccaaaaactttgatatcaagttttgtcacgatctgattgattattttaaagcaagcattaatgcaaatccggattggaaagtttttgattttaaattcagcgataccaaaagctatgaagatattagcggtttttattctgaagttgaaaagcagggttataagatcagctgggttaatattagcaaagaagatattgatcgtctggatgaaaccggtcagatttatctgtttcagatttataataaagactttagcgaaagcagcatgggtaccccgaatctgcataccctgtattttaaaaatctgtttagcgaagaaaatatccgtgaaaccgttctgaaactgagtggtaaaggtgaactgttttttcgtaaagcatctattgataaaccgagcggtcatcgtaaaggtagcattctggttaataaaacctataaaaccaatattggtaatgaagaagttcgtgttccgattccggataaagaatacatggaaatttatacctatctgaataatggtcgtaccaccaaactgtctgaaaatgcacagagcctgctggataataaactggttgaatattttgaagcagagaaagagattatcaaagatcgtcgttataccgttgataaatttttcatccacaccagcgttgttattaattataatgcagaaggtgcaagcgcaaaacagctgaatgagcaggttctggattatattagcaaacaggatgatatgcatattattggtattgatcgtggtgaacgtaatctggtttatgttagcgttattgatatgaaaggtcgtattgttgaacagaaaagctataatgttgttaactcttatagctatcagaaaaaacttgttgaacgtgaaaaagcacgtgatgaagcacgtaaaagctggaaagaagttggtcgtattaaagatctgaaagatggttatctgagcctggttgttcatgaaattgcagatatggttattaagtataacgcaattattgcaatggaagacctgaattatggttttaaacgtggtcgttttaaaattgagcgtcaggtttatcagaaatttgaaagcatgctgattagcaaactgagctatctggttgataaaaccaaaaaagttgatgaaccgggtggtgttctgaaaggttatcagctggcatttgttccgaaagaagttaaaaaagttggtcgtcagtgtggtattattttttatgttccgccggcatataccagcaaaattgatccggcaaccggttttgttgatatgtttaaatttaaaagcggtgaaaaagaaggtaccgcacgtgcagacaatgatcgtaaagagttcctgagcaaatttgattgcattcgttatgttgaaaaaaatgataaccgtgaagaaatgtttgcatttaccttcgactatgataattttgcaatgcacaataccgttattgccaaaaaaaagtggaccgcatatacctttggtagccgtattcagaaagtttatgaaaatggtcgttataccagcagcacccgtgaaattcagctgaccgataaaatgaaacgtctgctgaatgaaaacaatattgaatacggtgatggtcataatctggttgatgatattcgtaccctggatgttgatagcagcggtgcagttattaatgaaatttttaagattttccgtctgaccgttcagctgcgtaatagcaaaagcgaagcagaaaatgaaaaaaatggtgaatatgatcgtattatcagcccgatcatgaatgacgcaggtgaattttttgatagctttaagtataaaaaaatgaatgaagagaccgaaccgggtaaacataatgcaaccatgccgattgatgcagatgcaaatggtgcatattgtattgcaatgaaatgtctgtatgaagccaaaaatattaaaagcggttgggaaaaagaaggcaaaaagaataatgatctgctgtgtgttaccaatgcagattggtttgattttatgcagaataaacgttatgttaaacgtccggcagcgactaagaaggcggggcaagctaagaagaaaaaggggtcgggtcctgctgccaagagggtcaagttggacggcagtggtcatcaccatcatcatcattaa

SEQ ID NO: 685 - DNA, 3870 bp, synthetic construct
  misc_feature 1..3870: note = Sequence codon optimized for E. coli expression
  source 1..3870: mol_type = other DNA
atgaataatctgaaacagtttattggtatttatccggttagcaaaaccctgcgttttgaactgcgtccgattggtaaaacccaggaatggattgaaattaataaagttctggaaggtgatgttcagaaagcagcagattatccgaccgttaaaaagctgattgatgaataccataagatttgtattcatgatagcctgaaaaatgttcattttgattgggcaccgctgaaagaagcaattgttatttttcagaagaccaaaagcgatgaaagcaagaaacgtctggaagcagaacagaccattatgcgtaagcagattgcagccgccattaaagattttaaacattttaaagagctgaccgcagcaaccccgagcgatctgattaccagcgttctgccggaatttagcgatgatgattctctgatgagctttcgtggttttgccacctattttagcggttttcaggaaaatcgtattaatatttatagccaggaaagcattagcaccggtgttccgtatcgtattgttcatgataattttccgaaatttctgagcaatcaggaagtttatgatcgtattcgtagcgtttgtccggaagttattaaacaggcaagcgaagaactgcagccgtttctggagggtgttatgattgatgacatctttagcctggatttctacaacagcctgctgacccaggatggtattgatttttataatcgtgttattggtggtgttagcgaagaaggtaagcagaaatatcgtggtattaatgagttcagcaatctgtatcgtcagcagcataaagatctggcagcaagcaaaaaagcaatgaccatgattccgctgtttaaacagattctgagcgatcgtgaaaccctgagctatattccggttcagattgaaagcgaagatgaactggttagctctattaaacagttttatgaacatattacccattttgaacgtgatggtaaaaccgttaatgttctgagcgaactggttgcagttctgggtaatattgatagctataatccggatggtatttgtattagcgcaagcaaactgaccgatattagccagaaagtttatggtaagtggagcattattgaagagaaactgaaagaaaaagcaattatgcagtatggtgatattagcgttgcaaaaaataagaaaaaggttgatgcatatctgagccgtaaagcatattgtctgagcgacctgtgttttgatgaagttgttagctttagccgttattatagcgaactgccgcagatgctgaatgcaattaatggttattggatgcagtttaatgaatggtgtcgtagcgatgaaaaacagaaatttctgaataatccgatgggtaccgaagttgttaaatgtctgctggatgcaatgatggaactgtatcataaaagcgcagttctggttatgccggaagaatacgaggttgataaaagcttttacaatgaatttattccgctgtatgaagaactggataccctgtttctgctgtataataaagttcgtaattatctgacccgtaaaccgagcgatgttaaaaaatttaaactgaattttgaaagcccgagcctggcaagcggttgggatcagaataaagaaatgaagaacaatgccattctgctgtttaaagatggtaaaagctatctgggtgttctgaatgcaaaaaacaaagcaaaaattaaggatgcaaaaggtgatgcaagcagcagcagctataagaagatgatttataagctgctgagcgatccgagcaaagatctgccgcataaactgtttgcaaaaggcaatctggatttttataaaccgtctgaatatattctggaaggtcgtgaactgggtaaatacaaaaaaggtccgaatttcgacaaaaaattcctgcatgattttattgatttctataaagcagcaattgcaattgatccggattggagcaaatttaattttcagtatagcccgaccgaaagctatgaagatattggtgcatttttcagcgaaattaaaaaacaggcatacaaaattcgttttaccgatattaccgaaagccaggttaatgaatgggtggataatggtcagctgtatctgtttcagttatataataaagattatgcagaaggtgcacatggtcgtaaaaatctgcataccctgtattgggaaaacctgtttaccgatgaaaatctgagcaatctggttctgaaactgaatggtcaggcagaactgttttgtcgtccgcagagcattaaaaaaccggttagccataaaattggtagcaaaatgctgaatcgtcgtgataaaagcggtatgccgattccggagaacatttaccgtagcctgtatcagttttataatggtaaaaaaaaggaaagcgaactgaccaccgcagaaaaacagtatatggatcaggttattgttaaagatgttacccatgaaattattaaagatcgtcgttatacccgtcaggaatatttttttcatgttccgctgaccctgaatgcaaatgcagatggtaatgagtacattaacgaacaggttttaaactatctgaaatataatcctgatgtgaatattattggtatcgaccgtggtgaacgtcatctgatttatctgaccctgattaatcagcgtggtgagatcattaaacagaagacctttaatattgttaacaactacaattaccaggttaaactggaacagcgtgaaaaagaacgtgatgaagcacgtaaaagctgggatagcgttggtaaaattaaagatctgaaagaaggttttctgagcgcagttattcatgaaattaccaaaatgatgatcgaaaataacgcaattgtggttctggaagatctgaattttggttttaaacgtggtcgttttaaagttgaacgtcaggtttatcagaaatttgaaaaaatgctgattgacaagctgaactatctgagctttaaagatcgtgaagttggtgaagaaggtggtattctgcgtggttatcagatggcacagaaatttgttagctttcagcgtctgggtaaacagagcggttttctgttttatattccggcagcatataccagcaaaattgatccggttaccggttttgttaatcattttaattttaacgatattaccaatgcagagaaacgcaaagatttcctgatgaaaatggaacgtattgaaatgaagaatggttatattgaattcacctttgactatcgtaaatttaagacctatcagaccgattatcagaatgtttggaccgttagcacctttggtaaacgtattgttatgcgtattgatgaaaagggttataaaaaaatggttgattacgaaccgaccaatgatattatctatgcattcaaaaataaaggtatcttactgagcgaaggtagcgatctgaaagcactgattgcagatgttgaagcaaatgcaaccaatgcaggtttttttggcaccctgctgtatgcatttcagaaaacactgcagatgcgtaatagcaatgcactgaccgaagaagattttattctgagcccggttgcaaaagatggtcatcatttttgtagcaccgatgaagcaaataaaggtcgtgatgcacagggtaattgggttagccgtctgccggttgatgcagatgcaaatggtgcatatcatattgcactgaaaggtctgtatctgctgcgtaatccggagaccaagaaaattgaaaacgaaaaatggttccagtttatggttgaaaaaccgtatctggaaaaacgtccggcagcgactaagaaggcggggcaagctaagaagaaaaaggggtcgggtcctgctgccaagagggtcaagttggacggcagtggtcatcaccatcatcatcattaa

SEQ ID NO: 686 - DNA, 3891 bp, synthetic construct
  misc_feature 1..3891: note = Sequence codon optimized for E. coli expression
  source 1..3891: mol_type = other DNA
atggaaagcaataataaaatttttaccgaaaccattggtaccagcagcattgcaaaaaccatgcgtaatagcctggttccgaccgaaagcaccaaacgtaatattgaaaagaatggtattattatcgatgatcagctgcgtgcagaaaaacgtcagcagctgaaagaaattatggatgaatactatcgtacctacattgataataaactgagcaatgttgcactgacccgtaccattgattggaaagagctgtttcaggcaattgaagacaattataaacagaataccaccaaaaccaaaaatgaactggaaaaaaagcagaaagaaaaacgtaccgaaatttacaaaattctgagcgatgatgaaaaatttaagcagctgtttaatgcaaaactgctgaccaatgttctgccggagttcattaagaatcagaacattgacaatgaagaaaaacaggaaaaaattagcaccgttgaactgtttcagcgttttaccagcagcttcaccgactttttcaaaaatcgtaaaaatgtttttagcaaagatgaaatcagcaccagcatttgttatcgtgttgttcaggaaaatgcatggattttttatcagaatctgctggcatttgaagaaattaaaaaaaccgcagaacaggaaattgagaaaattgaagcagaaaatcgtgatagcattagcgattatagcctgaaagaaatctttgattttgatttttatggtctgctgctgaatcagggtggtattcgtttttataatgatgtttgtggtaaaatcaattatcacatgaacctgtatggtcagaaacataatatcaagagcaataagtttaagatgaagcgtatgcataaacagattctgagcattgatgaaagcacctttgaagttccgaccatgtttgaaaacgataaggaagtttatcaggttctgaatgaatttctgagcgatctggcaagcaaaaaaattctggaacgtgttgaaaaaattggtgaaaatgttagcgaatacgaaattaacaagatctacattcagagcaaaaatttcgaaaagtttagcagctttatgtgtggtaattggcagatcattaacgatagcctgaaaacctattataatgaaaaaatcaaaagcaagggtaaagcaaaagaagaaaaggttaaaaaggccattaaagcaattgaatataaaagcctggcagatattaatcagctggttgaacgttataataatgatgaactgaatcgtaaagcagaagaatatattagcgcaattaatgaaaagattaaagatctggatgttaacgaaatcgaatatgatgagaagatcaacctgattgaaaatgaaaccaaaagcgaagagattaaaagcaaactggatagcattatggaaatcatgcattggaccaaaatgtttattattgaagaagaaatcgagaaagacgtgaacttttacaatgaaattgaggaaatttatgatgagctgcagccgctggttaccatttataatcgtattcgtaattatgttacccagaaaccgtatagcgaagaaaaaattaaactgaattttggtattccgaccctggcaaatggttggagcaaaaccaaagaatatgataataatgcaatcatcatgattcgtgatggtaagtattacctgggtatttttaatgccaaaaataagccggataaaaaaattatggaaggtcatcagagcgaagaaaatggtgattataaaaaaatgatctaccgtctgctgccgggtccgaataaaatgctgccgaaagtttttatgagcaaaaccggtattgcagaatataaaccgagccagtatattctggaatgttatgaacagaacaagcacattaaaagcgacaaaaattttgatattaagttctgtcgtgacctgattgacttttttaaaaccagcattaatcgtcatccggaatggagcaaatttaattttaaatttagcgaaaccagcgaatatgaagatatcagcaccttttatcgtgaagttgaaaaacagggttataaaattgaatggacctatattagcgaaaaagaaattaaagaactggatgaaaacggtcagctgtatctgtttcagatttataataaagattttagcgaaaaaagcaaaggcaaagagaatctgcataccatgtatctgaaaaatctgtttagcgaggaaaatctgaaaaatattgtgctgaaactgaatggtgaagcagaagtttttttccgtaaaagcagcattaaaaaaccgattattcacaagaaaggtagcgttctggttaataaaacctataatgaaaatggtgaacgtaaaagcattccggaagaacagtatacagaaatttataaatacctgaatagcattggtacaaatgagctgagcgaaaaatcaaaaaaactgatggaagaaggtaaagttgaatattacaaagcaaattatgacatcgtgaaagattatcgttatagcgttgataagttttttattcacctgccgatgaccattaattttaaagcagcaggttttagcccgattaataatattgcactgaaaaatatcgcactgaaagacgatatgcatattattggtattgatcgtggtgagcgtaatctgatttatgttagcgttattgataccaaaggtaatattgttgaacagcgtaattttaacatcgtgaatggtattgactacaaggaaaaactgaaacagaaagaactggaccgtgataatgcacgtaaaaattggaaagaaattggtaaaattaaagacctgaaagaaggttatctgagcctggttgttcatgagattgcaaagctggttgtgaaatataatgcaattattacaatggaagacctgaatcagggctttaaacgtggtcgttttaaagttgaacgtcaggtttatcagaagtttgagaccatgctgattaataaactgaattatctggttgataaagatctggcagttgatcaggaaggtggtctgctgcgtggttatcagctgacctatattccggaaagcctgaaagttctgggtcgtcagtgtggttatattttttatgttccggcagcatataccagcaaaattgatccgaccaccggttttgttgcaatttttaattataagggcatgaccgataaagattttgttaccagctttgatagcattaaatatgatgacgaacgtggtctgtttgcatttgaatttgactatgaaaattttgttacccataaagttgagatggcacgtaataaatggaccgtttatacctacggtgaacgtattaaacgtaaatttaaaaatggtagctgggataccgcagaaaaagttgatctgacctatcagatgcgtagcattctggaaaaatacgaaattgagtataacaagggtcaggatattctggaacagattgaagaattagatgaaaaagcacagaacggtatttgtaaggagattaaatacctggttaaagatattgttcagatgcgtaattctctgccggataatgcagcagaagattacgatgcaattatttctccggttattaataataatggcgaattttttgatagcacccgtggtgatgaagataaaccgctggatgcagatgcaaatggtgcatattgtattgcacttaaaggtctgtatgaagttatgcagattaaaaaaaactggaatgaagaaaccgaatttccgcgtaaagagctgaaaattcgtcatcaggattggtttgattttattcagaataaacgttatctgaaacgtccggcagcgactaagaaggcggggcaagctaagaagaaaaaggggtcgggtcctgctgccaagagggtcaagttggacggcagtggtcatcaccatcatcatcattaa

SEQ ID NO: 687 - DNA, 3891 bp, synthetic construct
  misc_feature 1..3891: note = Sequence codon optimized for E. coli expression
  source 1..3891: mol_type = other DNA
atgaactataaaaccggtctggaagactttattggtaaagaaagcctgagcaaaaccctgcgtaatgcactgattccgaccgaaagcaccaaaattcatatggaagaaatgggtgttattcgtgatgatgaactgcgtgcagaaaaacagcaggaactgaaagaaattatggatgattattaccgtacctttattgaagaaaaactgggtcagattcagggtattcagtggaatagcctgtttcagaaaatggaagaaacaatggaagatattagcgttcgtaaagatctggataaaattcagaatgaaaaacgtaaagaaatttgttgctatttcaccagcgataaacgttttaaagatctgttcaatgcaaagctgattaccgatattctgccgaattttattaaagataataaggagtacaccgaagaagaaaaggcagaaaaagaacagacccgtgttctgtttcagcgttttgcaaccgcatttaccaattattttaatcagcgtcgtaataattttagcgaagacaatattagcaccgcaattagctttcgtattgttaatgagaatagcgagattcatctgcagaatatgcgtgcatttcagcgtattgaacagcagtatccggaagaagtttgtggtatggaagaagaatataaggatatgctgcaggaatggcagatgaaacatatttatagcgttgatttttatgatcgtgaactgacccagccgggtattgaatattataatggtatttgtggtaaaattaatgagcacatgaaccagttttgtcagaaaaatcggattaataagaatgatttccgtatgaaaaaactgcataaacagatcctgtgtaaaaaaagcagctattatgaaattccgtttcgttttgaaagcgatcaggaagtttatgatgcactgaatgagtttattaagaccatgaaaaaaaaggaaattattcgtcgttgtgttcatctgggtcaggaatgtgatgattatgatctgggtaaaatttatatcagcagcaataaatatgagcagattagcaatgcactgtatggtagctgggataccattcgtaaatgtattaaagaagaatacatggatgcactgccgggtaaaggtgaaaaaaaagaagagaaagcagaagcagcagcaaaaaaggaagaataccgtagcattgcagatattgataaaattattagcctgtatggttctgaaatggatcgtaccattagcgcaaaaaaatgtattaccgaaatttgtgatatggcaggtcagattagcattgatccgctggtttgtaatagcgatattaaactgctgcagaataaagaaaaaaccaccgaaattaaaaccattctggatagctttctgcatgtttatcagtggggtcagacctttattgttagcgatattatcgaaaaagatagctatttttacagcgaactggaagatgttctggaagattttgaaggtattaccaccctgtataatcatgttcgtagctatgttacccagaaaccgtatagcaccgttaaatttaaactgcattttggtagcccgaccctggcaaatggttggagccagagcaaagaatatgacaacaatgcaatcctgctgatgcgtgatcagaaattttatctgggtatttttaatgttcgtaataaaccggataaacagattattaaaggtcatgaaaaagaagaaaaaggcgactataagaaaatgatttacaatctgctgccgggtccgagcaaaatgctgccgaaagtttttattaccagccgtagcggtcaggaaacctataaaccgagcaaacatattctggatggttataatgaaaaacgccatattaaaagcagcccgaaatttgatctgggttattgttgggatctgattgattattataaagaatgtattcataagcatccggattggaaaaactacgattttcacttcagcgataccaaagattatgaagatatttctggtttttatcgtgaagttgaaatgcagggttatcagattaaatggacctatattagcgcagatgaaattcagaaactggatgaaaaaggtcagattttcctgtttcagatttataataaagactttagcgttcatagcaccggtaaagataatctgcataccatgtatctgaaaaacctgtttagcgaagaaaatctgaaagatattgtgctgaaactgaatggtgaagcagaactgttttttcgtaaagcaagcattaaaaccccgattgttcataaaaaaggtagcgttctggttaatcgtagctatacccagaccgttggtaataaagaaattcgtgttagcattccggaagaatactataccgaaatttacaattatctgaatcatattggtaaaggtaagctgagcagcgaagcacagcgttatctggatgaaggtaaaattaaaagctttaccgcaaccaaagatattgttaaaaattaccgttattgctgcgatcactattttctgcatctgccgattaccattaattttaaagcaaaaagcgatgttgcagttaatgaacgtaccctggcatatattgccaaaaaagaagatattcatattattggtattgaccgtggtgaacgtaacctgctgtatattagcgttgttgatgttcatggtaatattcgtgaacagcgtagctttaatattgttaatggttatgattatcagcagaaactgaaagatcgtgagaaaagccgtgatgcagcacgtaaaaattgggaagaaattgaaaaaatcaaagaactgaaagagggttatctgagcatggttattcattatattgcacagctggttgttaaatataatgcagtggttgcaatggaggatctgaattatggttttaaaaccggtcgttttaaagttgaacgtcaggtttatcagaaatttgagaccatgctgattgaaaaactgcattatctggtttttaaagatcgtgaagtttgtgaagaaggtggtgttctgcgtggttatcagctgacctatattccggaaagcctgaaaaaagttggtaaacagtgtggttttattttttatgttccggcaggttataccagcaaaattgatccgaccaccggttttgttaatctgtttagctttaaaaatctgaccaatcgtgaaagccgtcaggattttgttggtaaatttgatgaaattcgttatgaccgtgataagaagatgttcgagttcagcttcgattacaataattatattaagaaaggtaccattctggcaagcaccaaatggaaagtttataccaatggtacccgtctgaaacgtattgttgttaatggtaaatataccagccagagcatggaagttgaactgaccgatgcaatggaaaaaatgctgcagcgtgcaggtattgagtatcatgatggtaaagatctgaaaggtcaaattgttgagaaaggtattgaagcagaaatcattgatatttttcgtctgaccgttcagatgcgtaatagccgtagcgaaagcgaagatcgtgaatatgatcgtctgattagcccggttctgaatgataaaggtgaattttttgataccgcaaccgcagataaaaccctgccgcaggatgcagatgcaaatggtgcatattgtattgcactgaaaggtctgtatgaagttaaacagatcaaagaaaattggaaagaaaatgaacagtttccgcgtaataagctggttcaggataataagacctggtttgattttatgcagaaaaaacgttatctgaaacgtccggcagcgactaagaaggcggggcaagctaagaagaaaaaggggtcgggtcctgctgccaagagggtcaagttggacggcagtggtcatcaccatcatcatcattaa

SEQ ID NO: 688 - DNA, 4029 bp, synthetic construct
  misc_feature 1..4029: note = Sequence codon optimized for E. coli expression
  source 1..4029: mol_type = other DNA
atgaataaagcagcagataattataccggtggtaattacgatgaatttattgcactgagcaaagttcagaaaaccctgcgtaatgaactgaaaccgaccccgtttaccgcagaacatattaaacagcgtggtattattagcgaagatgaatatcgtgcacagcagagcctggaactgaaaaaaattgcagatgaatattatcgtaactatattacccataagctgaatgatattaacaacctggatttttacaatctgtttgatgcaattgaagaaaagtataagaagaatgacaaggataatcgtgacaaactggatctggttgaaaaaagcaaacgtggtgaaattgcaaaaatgctgagcgcagatgataacttcaaaagcatgtttgaagcaaaactgattaccaaactgctgccggattatgttgaacgtaattatacaggtgaagataaagaaaaagcactggaaaccctggcactgtttaaaggttttaccacctattttaaaggttatttcaagacccgtaaaaatatgtttagcggtgaaggtggtgcaagcagcatttgtcatcgtattgttaacgtgaatgcaagcattttttatgataatctgaaaacctttatgcgtattcaggaaaaagcaggtgatgaaattgcactgattgaagaagaactgaccgaaaaactggatggttggcgtctggaacatattttttctcgtgattattacaacgaagttctggcacagaaaggtattgattattataaccagatttgtggtgatattaataagcacatgaatctgtattgtcagcagaataagtttaaggcaaacatttttaagatgatgaagctgcagaaacagattatgggtattagcgaaaaagttttcgaaattccgccgatgtatcagaatgatgaagaagtttatgcaagctttaacgaatttattagccgtctggaagaagttaaactgaccgatcgtctgcgtaacatcctgcagaatattaatatttacaataccgcaaagatttatatcaatgcccgttactataccaatgttagcacctatgtttatggtggttggggtgttattgaaagcgcaattgaacgttatctgtgtaataccattgcaggtaaaggtcagagcaaagttaagaagattgaaaacgcaaaaaaagacaataagtttatgagcgttaaagaactggatagcattgttgcagaatatgaaccggattattttaatgcaccgtatattgatgatgacgataatgcagttaaagtttttggtggtcagggtgttctgggttattttaataagatgagcgaactgctggcagatgttagcctgtataccattgattacaacagcgatgatagcctgattgaaaataaagaaagcgcactgcgtattaaaaagcagctggatgatattatgagcctgtatcattggctgcagacctttattattgatgaagttgttgaaaaagataatgcattctatgcagagctggaagatatttgttgtgagctggaaaatgttgttaccctgtatgatcgtattcgtaattatgttacccgtaaaccgtatagcacccagaaatttaaactgaattttgcaagcccgaccctggcaagcggttggagccgtagcaaagaatttgataataatgcaatcattctgctgcgcaacaataaatattacatcgccatttttaatgttaacaacaaaccggataaacagattattaaaggtagcgaagaacagcgtctgagcaccgactacaagaaaatggtttacaatttactgccgggtccgaataaaatgctgccgaaagtttttattaaaagcgataccggtaaacgtgattataatccgagcagctatattctggaaggttatgaaaaaaatcgtcatattaaaagcagcggtaattttgatatcaactattgtcatgacctgattgactattataaagcatgcattaataaacatccggaatggaaaaattatggttttaaattcaaagagaccaatcagtataacgatattggccagttttataaagatgttgaaaaacagggttatagcattagctgggcatatatttctgaagaagatattaacaaactggatgaagaaggtaagatttacctgttcgagatttataataaagatctgagcgcacatagcaccggtcgtgataatctgcataccatgtatctgaaaaatatttttagcgaggataatctgaagaacatttgtattgagctgaatggtgaagcagaactgttttatcgtaaaagcagcatgaaaagcaatattacacataagaaggataccattctggttaataaaacctatatcaatgaaaccggtgttcgtgttagcctgagcgatgaagattatatgaaggtgtacaactattacaacaacaattacgttattgataccgaaaacgacaaaaacctgattgatattatcgaaaaaattggtcatcgtaaatcaaagattgacatcgttaaagataaacgttataccgaagataaatattttctgtatctgccgattaccattaattatggtatcgaagatgagaatgtgaatagcaaaattattgagtacattgcaaaacaggataatatgaacgttattggtattgatcgtggtgaacgtaatctgatttatattagcgttattgataataaaggtaacatcatcgaacagaagagctttaacctggtgaataactacgattataagaataaactgaaaaatatggagaaaacccgtgataatgcacgtaaaaattggcaggaaattggtaaaattaaagatgtgaaaagcggttatctgagcggtgttattagcaaaattgcacgtatggttattgattacaatgcaattattgttatggaggatctgaataaaggttttaaacgtggtcgttttaaagttgaacgtcaggtttatcagaaattcgaaaatatgctgattagcaaactgaattatctggtttttaaagaacgtaaagcagatgaaaatggtggtattctgcgtggttatcagctgacctatattccgaaaagcattaaaaatgttggtaaacagtgtggttgtattttttatgttccggcagcatataccagcaaaattgatccggcaaccggctttattaatatttttgatttcaaaaaatatagcggtagcggtattaacgcaaaagttaaggataaaaaagaattcctgatgagcatgaatagcattcgttatattaatgaaggttctgaagaatatgaaaagatcggtcatcgtgaactgtttgcatttagctttgattataataattttaaaacctacaacgtgagcagcccggttaatgaatggaccgcatatacctatggtgaacgtattaaaaaactgtataaagatggtcgttggctgcgtagcgaagttctgaatctgaccgaaaatctgattaaactgatggaacagtataatattgaatataaagatggccatgatattcgtgaagatattagccatatggatgaaacccgtaatgcagattttatttgtagcctgtttgaagaactgaaatataccgttcagctgcgtaatagcaaaagcgaagcagaagatgaaaattatgatcgtctggttagcccgattctgaatagcagcaatggtttttatgatagcagcgattatatggaaaatgaaaataataccacccataccatgccgaaagatgcagatgcaaatggtgcatattgtattgcactgaaaggtctgtatgaaattaataaaattaagcagaactggagcgatgataagaagtttaaagaaaatgagctgtatattaatgttaccgaatggctggattatattcaaaatcgtcgttttgaaaaacgtccggcagcgactaagaaggcggggcaagctaagaagaaaaaggggtcgggtcctgctgccaagagggtcaagttggacggcagtggtcatcaccatcatcatcattaa

SEQ ID NO: 689 - DNA, 3900 bp, synthetic construct
  misc_feature 1..3900: note = Sequence codon optimized for E. coli expression
  source 1..3900: mol_type = other DNA
atggcaaaaaataccatttttacccagtttaccggtctgtatccggttagcaaaaccctgcgttttgaactgaaaccgatgggtaaaaccctggaaaaaattaaagaaaccggtgttattgaaaatgataaaaagcgtcataacgattacttcgacgcaaaaaagattatcgataagtaccataagtattttattgatgccgcactgagcaaattttctcgtattgattggaatccgctgaaagaagcaattgaaggtagcctggatcgtagcgatgcaagcaaaaaaaagctggaaaaaacccagaccgaatttcgtaaaaaaattgccaaagcactgaccacccatgatcattacaaagaactgaccgcaagcaccccgaaagatctgtttctgaaagtttttccggatcattttggtaaacagccggcaattgatacctttgatggttttagcagctattttaccggttttcaggaaaatcgtcagaatatttatagcgatgaagcaattagcaccgcaattccgtatcgtctggttcatgacaactttccgaaatttctgagcaatattgaagtttataaaaccctgaaagataatgcaccgagcgttctgagcgatgcagaaaatgaactgaaagattttctgaacggtaaaccgctggcaaatatttttgaattaaatgcctataacgacgttctgacccagagcggtattgatttttttaatcaagttattggtggtattagcggtgaaggtggtgaaaaaaagacccgtggtattaatgaatttagtaatctgtatcgtcagcagcatccggaatttgcacagaaacgtctggcaaccaaaatgattccgctgtataaacagattctgagcgatcgtgaaaccaaaagctttattctggaaagctatagcaccgatagccaggttcaggaaagcgttaaagaattttttgaaagccagattctgaattgtgatattgcaggtcgtaaagttaatgttctgaatgaactgaccagcctgattaaacgtattgcagaatttgatctgggtagcatttatattaatcaggaagaactgagcaatatcagcctggaactgtttaaaagctggaataccatcaatgcagttctgtttaaaaatgcagaaaatcgcattggtagcgcagaaaaagcagcaaataagaagaaaattgatgcatggatgaaaagcaatgaatttagcattgcaaccctgaatctggcaattgcagaaagcgatagcgaagaaattagccgtgttaaaatcgaaagctattggaatgattttgaagcaaaagttcagagcattctgtgtggtgataatcgtcgtaatctggatgaatttctgagcgcaacctttaatgaaaataatgcactgcgtgaagatagcgaaattattggtaaactgaaagcatttctggatgcactgattgaaattatgcatagcattaaaccgctgattagcgatgcagagaatcgtgatctgagcttttataatgaactgatgccgctgtatgatcagctgagcctggttgttccgttatataataaaattcgtaattatgcaacccagaaactgaccgaaagcgaaaaatttaaactgaattttgataatccgaccctggcagatggttgggatcagaataaagaagatgcaaacaccgcaattttactgctgaaaaatggtctgtattatctgggtattatgaacgcaaagaataaaccgaaaattaaagattttaagaccagcgaaagcgaagattgttatgataaaatggtttataaactgctgccgggtccgaataaaatgctgccgaaagttttttttagcgaaaaaggtctggcaacctttaaaccgccgaaagatattctggatggttataatgcaggtaaacataaaaaaggtgatctgttcgatattggtttttgccaccagttaattgacttttttaaagaaagcattgcaaaacatccggattggaaaaaatttgactttaaatttagcgataccagcagctatgaagatattagcggtttctacaaagaagttaccgatcagggttataaaattacctttagcaaaattccgaccagccagattgacgaatgggtgaatgaaggtaagctgtttctgtttcagatttataataaagattttgcaccgggtgcaaaaggtagcccgaatctgcataccctgtattggaaaagcgtttttagcccggaaaatctgaaagatgttgttgttaaactgaatggtgaagcagaactgttttatcgtccgagcagcgttaaaaagccgtatagccataaagttggtgaaaaactggttaatcgtattggtaaagatggtctgccgctgccggaaagcgtttttggtgaactgtttcgttattttaatggtaaactggatggtgaactgagcgatgaagccaaacgttatctggatgttgcagttgttaaagatgttaaacatgaaattgttaaagatcgtcgttatacccaggataaatttgaatttcatgttccgctgaccctgaattttaaagcagatagcaaaaatgagtatatgaatgaacgtgttcgtcattttctgaaagataacccggatgttaatattattggtattgatcgtggtgaacgtcatctgctgtatatgaccctgattaatcagaaaggtgaaattctgaagcagaaaagctttaatattgttgaaagcgttaattaccaggcaaaactggttcagcgtgaaaaagaacgtgatgcagcacgtaaaagctggagcagcgttggtaagattaaagatctgaaagaaggttttctgagccaggttattcatgaaattaccaccaccatgattgagaataatgcaatcgttgtgctggaagatctgaattttggttttaaacgtggtcgtttttgtgttgaacgtcaggtttaccagaagtttgagaaaatgctgattgataaactgaattatctggtttttaagaacaaaccggaaggtgatgttggtggtgttctgaaaggttatcagctggcagaaaaatttgatagctttcagaaattaggtaaacagagcggttttctgttttatattccggcagcatacaccagcaaaattgatccgaccaccggttttgcaaatctgtttaatatgaccgaactgacctctgcagaaaaaaagaaagattttttgagccattttgatgatattacctatgatggtaaaaatgatcgttttctgtttggtttcgactacaagaactttaaatgttttcagaccgattttattaagaaatggaccgtttatacccagggtaaacgtattgtttatgataaagaaagcaaaagcgcaaaagaaatttttccggttgaaattattaaagcagcactggcaaaacagaatattgcactgaccgatcagctggatgttctgagcgccattaatagcgttgaagcaagcccgaagagcgcaagcttttttggtaatatttgttatgcatttgaaaaaaccctgcagatgcgtaatagcattccgaataccgatgaagattatttagttagcccggttatgaataaacgtggtgaattttatgatagccgtagctgtgatgatgcactgccgcagaatgcagatgcaaatggtgcatatcatattgcattaaaaggtctgtatctgattaaaaatgttttcgatgcaggtggtaaagatttaaagattagccatgaagattggtttaaatttgcacagtcacgtaattgtaaacgtccggcagcgactaagaaggcggggcaagctaagaagaaaaaggggtcgggtcctgctgccaagagggtcaagttggacggcagtggtcatcaccatcatcatcattaa

SEQ ID NO: 690 - DNA, 3927 bp, synthetic construct
  misc_feature 1..3927: note = Sequence codon optimized for E. coli expression
  source 1..3927: mol_type = other DNA
atgaaaaatctggcaaattttaccaatctgtatagcctgcagaaaaccctgcgttttgaactgaaaccgattggtaaaaccctggattggattattaaaaaagatctgctgaaacaggatgaaattctggcagaagattataagatcgttaaaaagattatcgatcgctatcacaaggattttattgacctggcatttgaaagcgcatatctgcagaaaaaaagcagcgatagctttaccgcaattatggaagcaagcattcagagctatagcgaactgtattttattaaagagaaaagcgatcgtgataaaaaagcaatggaagaaattagcggtattatgcgtaaagaaattgttgaatgttttaccggtaaatatagcgaagttgttaaaaagaagttcggtaacctgtttaaaaaagaacttattaaggaagacctgctgaatttttgtgaaccggatgaactgccgattattcagaaatttgcagatttcaccacctattttaccggttttcatgaaaatcgtgaaaatatgtatagcaatgaagaaaaagcaaccgcaattgcaaatcgtctgattcgtgagaatctgccgcgttatctggataatctgcgtattattcgtagcattcagggtcgttataaagattttggttggaaagatctggaaagcaatctgaaacgtattgataaaaatctgcagtatagcgattttctgaccgaaaatggtttcgtttatacctttagccagaaaggtattgatcgttataatctgattctgggtggtcagagcgttgaaagcggtgaaaaaattcagggcctgaatgaattaattaatctgtatcgtcagaaaaatcaactggatcgtcgtcagctgccgaatctgaaagaactgtataaacagattctgagcgatcgtacccgtcatagctttgttccggaaaaatttagcagcgataaagcactgctgcgtagcctgctggattttcacaaagaagttatccagaataaaaatctgtttgaagaaaagcaggttagcctgctgcaggcaattcgtgaaaccctgaccgatctgaaaagctttgatctggatcgtatttatctgaccaatgataccagcctgacccagattagcaattttgtttttggtgattggagcaaagttaaaaccattctggcaatttattttgatgaaaatattgcaaatccgaaagatcgtcagcgtcagagcaatagctatctgaaagcaaaagaaaattggctgaaaaaaaactactatagcattcatgagctgaatgaagcaattagcgtttatggtaaacatagcgatgaagaactgccgaataccaaaattgaagattattttagcggtctgcagaccaaagatgaaaccaaaaaaccgattgatgttctggatgcaattgttagcaaatatgcagatctggaatctctgctgaccaaagaatatccggaagataagaacctgaaaagcgataaaggtagcattgaaaagatcaaaaattacctggacagcattaaacttctgcagaattttctgaaaccgctgaaaccgaaaaaagttcaggatgaaaaagatctgggtttttataacgatctggaactgtacctggaaagcctggaaagcgcaaatagcctgtataataaagttcgtaattatctgaccggtaaagagtatagcgatgagaaaattaaactgaatttcaagaacagcaccctgctggatggttgggatgaaaataaagaaaccagcaatctgagcgttatttttcgtgataccaataactattatctgggtattctggacaaacagaataatcgtatttttgaaagcattccggaaattcagagcggtgaagaaaccattcagaaaatggtttataaactgctgccgggtgcaaataatatgctgccgaaagttttttttagcgaaaaaggtctgctgaaatttaatccgagcgatgaaattaccagcctgtatagcgaaggtcgttttaaaaaaggtgacaaattcagcattaacagcctgcataccctgattgatttttataaaaaaagcctggcagttcatgaagattggagcgtttttaattttaaatttgatgagaccagccattatgaagatattagccagttttatcgtcaggttgaaagccagggttacaaaattaccttcaaaccgattagcaaaaaatatattgataccctggttgaagatggtaagctgtatctgtttcagatttataataaagattttagccagaataagaaaggtggtggtaaaccgaatctgcataccatttattttaaaagcctgtttgagaaggagaatcttaaagatgttattgttaaactgaatggtcaggcagaagttttttttcgtaaaaaaagcattcattacgacgaaaatattacccgttatggtcatcatagcgaactgctgaaaggtcgtttttcatatccgattctgaaagataaacgttttaccgaagataaattccagtttcactttccgattaccttaaattttaaaagcggcgaaattaaacagtttaatgcacgtgttaacagctatcttaaacacaacaaagacgttaaaattattggtatcgatcgtggtgaacgtcacctgctgtatctgagcctgattgatcaggatggtaaaattctgcgtcaggaaagcctgaacctgattaaaaatgatcagaatttcaaggccattaattatcaggaaaagctgcataaaaaagaaattgaacgtgatcaggcacgtaaaagctggggttctattgaaaatattaaagaactgaaagaaggttatctgagccaggttgttcataccattagcaaactgatggtggaacataacgcaattgttgttctggaagatctgaattttggttttaaacgtggtcgtcagaaagttgaacgtcaggtttatcagaaatttgaaaagatgctcattgagaagctgaattttctggtttttaaagataaagaaatggatgaaccgggtggtattctgaaagcatatcagctgaccgataattttgttagctttgaaaaaatgggtaaacagaccggttttgttttttatgttccggcatggaataccagcaaaattgatccgaaaacaggttttgttaactttctgcatctgaattatgaaaatgttaatcaggcaaaagaactgattggtaaatttgatcagattcgttataatcaggatcgtgattggttcgaatttcaggttaccaccgatcagttttttaccaaagaaaatgcaccggatacccgtacctggattatttgtagcaccccgaccaaacgtttttatagcaaacgtaccgttaatggtagcgttagcaccattgagattgacgttaatcagaaactgaaagaattatttaatgactgtaactatcaggatggtgaagatctggttgatcgtattctggaaaaagatagcaaagattttttttccaaactgatcgcatacctgcgtattctgaccagcctgcgtcagaataatggtgaacagggttttgaagaacgtgattttattctgagcccggttgttggtagcgatggtaaattttttaatagcctggatgcaagcagccaggaaccgaaagatgcagatgcaaatggtgcatatcatattgccctgaaaggtctgatgaatctgcatgttattaatgaaaccgatgatgaaagcctgggtaaaccgagctggaaaattagcaataaagattggctgaattttgtttggcagcgtccgagcctgaaagcaaaacgtccggcagcgactaagaaggcggggcaagctaagaagaaaaaggggtcgggtcctgctgccaagagggtcaagttggacggcagtggtcatcaccatcatcatcattaa

SEQ ID NO: 691 - DNA, 3849 bp, synthetic construct
  misc_feature 1..3849: note = Sequence codon optimized for E. coli expression
  source 1..3849: mol_type = other DNA
atggaaacctttagcggttttaccaatctgtatccgctgagcaaaaccctgcgtttccgtctgattccggttggtgaaaccctgaaacattttattggtagcggtattctggaagaagatcagcatcgtgcagaaagctatgttaaagtgaaggcaattattgatgattaccatcgtacctatattgaaaatagcctgagcggttttgaactgccgctggaaagcaccggtaagtttaacagcctggaagaatattatctgtatcataatattcgtaataaaaccgaggagattcagaacctgagcagcaaagttcgtaccaatctgcgtaaacaggttgttacccagctgaccaaaaatgaaatttttaagcgtattgacaaaaaagagctgattcagagcgatctgattgattttgttaaaaatgaaccggatgcaaatgagaaaattgcactgattagcgaatttcgtaattttaccgtttattttaaaggctttcatgaaaatcgtcgtaatatgtatagcgatgaagaaaaaagcaccagcattgcctttcgtctgattcatgaaaatttaccgaagtttattgataatatggaagttttcgccaaaattcagaataccagcattagcgaaaattttgatgcaattcagaaagaactgtgtccggaactggttaccctgtgtgaaatgtttaaactgggttattttaataaaaccctgagccagaaacagattgatgcatataataccgttattggtggtaaaaccaccagcgaaggcaaaaagattaagggtctgaatgaatatattaatctgtataatcagcagcataaacaggaaaaactgccgaaaatgaaactgctgtttaaacagattctgagcgatcgtgaaagcgcaagctggctgctggaaaaatttgaaaatgatagccaggttgttggtgcaatggttaatttttggaataccattcatgataccgttctggcagaaggtggtctgaaaaccattattgcaagcctgggtagctatggtctggaaggtatttttctgaaaaatgatctgcagctgaccgatattagccagaaagcaaccggtagctggagcaaaattagcagcgaaattaaacagaaaattgaagcaatgaatccgcagaaaaagaaagaaagctatgaaagctatcaggaacgtattgataagctgtttaaaagctataaaagctttagcctggcatttgttaatgaatgtctgcgtggtgaatataaaattgaagattattttctgaaactgggtgcagttaacagcagcctgctgcagaaagaaaatcattttagccatatcctgaatacctataccgatgttaaagaagttattggtttttatagcgaaagcaccgataccaaactgattcaggataatgatagcattcagaagatcaaacagtttctggatgcagttaaagatctgcaggcatatgttaaaccgctgctgggtaatagcgatgaaaccggtaaagatgaacgtttttatggtgacctgattgaatattggagcctgctggatctgattaccccgctgtataatatggttcgtaattatgtgacccagaaaccgtacagcgttgataaaattaaaattaattttcagaatccgaccctgctgaatggttgggatctgaataaagaaatggataataccagcgttattctgcgtcgtgatggtaaatattacctggcaattatgaataataaaagccgtaaagtgtttctgaaatatccgagcggtaccgatcgtaattgttatgaaaaaatggaatataaactgctgccgggtgcaaataagatgctgccgaaagttttttttagcaaaagccgtattaatgaatttatgccgaatgaacgtctgctgagcaattatgaaaaaggtacccataaaaaaagcggtacctgttttagcctggatgattgtcataccctgatcgatttttttaaaaaatcactgaataaacacgaggattggaaaaactttggttttaaatttagcgataccagcacctatgaagatatgagcggtttttataaagaagttgagaatcagggctataaactgagctttaaaccgattgatgcaacctatgttgaccagctggttgatgaaggtaaaatttttctgttccagatttataataaagacttcagcgaacatagcaaaggtaccccgaatatgcataccctgtattggaaaatgctgtttgatgaaaccaatctgggtgatgttgtttataaactgaatggtgaagcagaagttttttttcgtaaagcaagcattaatgttagccatccgacccatccggcaaatattccgattaaaaaaaagaacctgaaacataaagatgaggaacgtattctgaaatatgacctgattaaagataaacgttataccgttgatcagtttcagtttcatgttccgattaccatgaattttaaggcaaatggtaatggcaatattaatcagaaagcaattgattatctgcgtagcgcaagcgatacccatattatcggtattgatcgtggtgaacgtaatctgctgtatctggttgttattgatggtaatggtaagatttgtgagcagtttagcctgaatgaaattgaagttgaatataacggtgagaaatacagcaccaattatcatgatctgctgaatgttaaagaaaatgaacgtaaacaggcacgtcagagctggcagagcattgcaaatattaaagatctgaaagaaggttatctgagccaggttattcataaaattagcgaactgatggttaaatataatgccattgttgttctggaagatctgaatgcaggttttatgcgtggtcgtcagaaagttgaaaaacaggtttatcagaaattcgaaaaaaagctgattgagaagctgaattatctggtttttaaaaaacagagcagcgatctgccgggtggtctgatgcatgcatatcagctggcaaataaatttgaaagctttaataccctgggtaaacagagcggttttctgttttatattccggcatggaataccagcaaaatggatccggttaccggttttgttaatctgtttgatgttaaatatgaaagcgttgacaaagcaaagagctttttttctaaatttgatagcattcgttataatgttgagcgtgatatgtttgaatggaaatttaactacgatgaatttaccaaaaaagcagaaggtaccaaaaccgattggaccgtttgtagctatggtaatcgtattattacctttcgtaatccggataaaaatagccagtgggataataaggagattaatctgaccgaaaatattaaactgttatttgaacgttttggtattgatctgagcagcaatctgaaagatgaaattatggaacgtaccgaaaaagagtttttcattgaactgattagcctgtttaaacttgttctgcagatgcgtaatagctggaccggtaccgatattgattatttagttagcccggtttgtaatgaaaatggtgaattttttgatagccgtaatgttgatgaaaccctgccgcagaatgcagatgcaaatggtgcatataatattgcacgtaaaggtatgattctgctggataaaatcaagaaaaataatggtgagaaaaagctgaccctgagcattaccaatcgtgaatggctgagctttgcacagggttgttgtaaaaatggtaaacgtccggcagcgactaagaaggcggggcaagctaagaagaaaaaggggtcgggtcctgctgccaagagggtcaagttggacggcagtggtcatcaccatcatcatcattaa

SEQ ID NO: 692 - DNA, 3849 bp, synthetic construct
  misc_feature 1..3849: note = Sequence codon optimized for E. coli expression
  source 1..3849: mol_type = other DNA
atgcaggaacacaaaaagattagccatctgacccatcgtaatagcgttcagaaaaccattcgtatgcagctgaatccggttggtaaaacaatggattattttcaggcaaaacagattctggaaaatgatgaaaagctgaaagaaaattaccagaaaattaaagagattgcagaccgtttttatcgtaatctgaatgaagatgttctgagcaaaacccgtctggataaactgaaagattataccgatatttattatcattgtaacaccgatgcagatcgtaaacgtctggatgaatgtgcaagcgaactgcgtaaagaaattgttaagaatttcaagaatcgtgatgaatacaacaagctgtttaataagaagatgatcgagattgttctgccgaaacatctgaaaaatgaagatgagaaagaagtggttaccagctttaaaaactttaccacctattttaccggtttttttacaaaccgtaaaaatatgtatagcgatggtgaagaaagcaccgcaattgcatatcgttgtattaatgaaaatctgccgaagcatctggataatgttaaagcatttgaaaaggcaattagcaaactgagcaaaaatgcaattgatgatctggataccacctatagcggtctgtgtggcaccaatctgtatgatgtttttaccgttgattattttaatttcctgctgccgcagagcggtattaccgaatataataaaattattggcggttataccaccaatgatggtaccaaagtgaaaggtattaatgagtacattaatctgtataatcagcaggttagcaaacgtgataagattccgaatctgaaaattctgtataaacagattttaagcgaaagcgaaaaagttagcttcattccgccgaaatttgaagatgataatgaactgctgagcgcagttagcgaattttatgcaaatgatgaaacctttgatggtatgccgctgaaaaaagcaattgacgaaaccaaactgctgtttggtaatctggataatccgagcctgaatggtatttacattcagaatgatcgtagcgttaccaatctgagcaatagcatgtttggtagctggagcgttattgaggatctgtggaataaaaactatgatagcgtgaatagcaatagccgtattaaagatattcagaaacgtgaagataaacgtaaaaaggcatataaagcagaaaaaaaactgagcctgagctttctgcaggttctgattagcaatagcgaaaatgatgagattcgtgaaaaaagcattgttgattattataagaccagcctgatgcagctgaccgataatctgagcgataaatataatgaagcagcaccgctgctgaatgaaaattacagcaatgaaaaaggcctgaaaaatgatgataaaagcattagcctgattaaaaacttcctggatgcaattaaggaaattgaaaagttcatcaaaccgctgagcgaaaccaatattaccggtgaaaaaaatgatctgttttatagccagtttacaccgctgctggataatattagccgtattgatattctgtatgataaagttcgtaactacgttacccagaaaccgtttagcaccgataaaattaaactgaattttggtaatagccagctgctgaatggttgggatcgtaataaagaaaaagattgtggtgcagtttggctgtgtaaagatgaaaagtactatctggcaattattgacaagagcaataattccattctggaaaacattgattttcaggattgtgatgaaagcgattgttatgagaaaattatttataagctgctgccgggtccgaataaaatgctgccgaaagtttttttcagcgaaaaatgtaaaaaactgctgagcccgagcgatgaaattctgaaaatttataaaagcggtacctttaaaaccggtgataaatttagcctggatgattgtcataaactgattgatttttataaagagagctttaagaagtacccgaattggctgatttataatttcaaattcaagaaaaccaacgaatacaatgacattcgtgaattttataatgatgtggcactgcagggttataatattagcaaaatgaaaattccgaccagctttattgataaactggttgatgaaggtaagatttacctgtttcagctgtataataaagattttagcccgcatagcaaaggtaccccgaatctgcataccctgtattttaaaatgctgtttgatgaacgtaatctggaagatgttgtttatcgtctgaatggtgaagcagaaatgttttatcgtccggcaagcattaaatatgataaaccgacccatccgaaaaataccccgattaaaaataaaaataccctgaacgataaaaagaccagcacctttccgtatgacctgattaaagataaacgttacaccaaatggcagtttagcctgcattttccgattaccatgaattttaaagcaccggataaagcaatgattaatgatgacgttcgtaatctgctgaaaagctgtaataataattttatcattggtattgatcgtggtgaacgtaatttgctgtatgttagcgttattgatagcaatggtgcaattatctaccagcatagcctgaatattattggtaataaattcaaagagaagacctatgaaaccaattaccgtgaaaaactggcaacccgtgaaaaagaacgtaccgaacagcgtcgtaactggaaagccatcgaaagcattaaagaactgaaagaaggttatattagccaggcagttcatgttatttgtcagctggttgttaaatatgatgcaatcattgttatggaaaaactgaccgatggttttaaacgtggtcgtaccaaatttgaaaagcaggtttatcagaaatttgagaaaatgctgattgataaacttaattactacgtggataagaaactggatccggatgaagaaggtggtctgctgcatgcatatcagctgaccaataaactggaaagctttgataaattaggtatgcagagcggttttattttttatgttcgtccggattttaccagcaaaattgatccggttaccggttttgttaatctgctgtatccgcagtatgaaaatattgacaaagcaaaagatatgattagccgttttgatgaaattcgttataatgcaggtgaagattttttcgaatttgatatcgattatgatgaatttccgaaaaccgcaagcgattatcgtaaaaaatggaccatttgtaccaatggtgaacgtattgaagcatttcgtaatccggcaaataataatgaatggagctatcgtaccattattctggcagaaaagtttaaagagctgtttgataacaacagcattaattatcgtgatagcgatgatctgaaagcagaaattctgagccagaccaaaggtaaattctttgaagactttttcaagctgctgcgtctgaccctgcagatgcgtaatagcaatccggaaaccggtgaagatcgtattctgagcccggttaaagataagaatggtaatttctacgatagcagcaaatatgatgaaaaaagtaaactgccgtgtgatgcagatgcaaatggtgcatataatattgcacgtaaaggtctgtggattgttgaacagtttaaaaaagcagataatgttagcaccgttgaaccggttattcataacgatcagtggctgaaatttgttcaggaaaatgatatggcaaataataaacgtccggcagcgactaagaaggcggggcaagctaagaagaaaaaggggtcgggtcctgctgccaagagggtcaagttggacggcagtggtcatcaccatcatcatcattaa

SEQ ID NO: 693 - DNA, 4014 bp, synthetic construct
  misc_feature 1..4014: note = Sequence codon optimized for E. coli expression
  source 1..4014: mol_type = other DNA
atgaactttcagccgtttttccagaaatttgttcatctgtatccgattagcaaaaccctgcgttttgaactgattccgcagggtgcaacccagaaatttattagcgaaaaacaggttctgctgcaggatgaaattcgtgcacgtaaatatccggaaatgaaacaggcaattgatggttatcataaagattttattcagcgtgcactgagcaatattgatagccaggtttttgaacaggcactgaatacctttgaagatctgtttctgcgtagccaggcagaacgtgcaaccgatgcatataagaaagatttcgaaaccgcacagaccaaactgcgtgaactgattgttcatagctttgaaaaaggtgaatttaagcaggaatataagagcctgtttgataaaaatctgattaccaatctgctgaaaccgtgggttgaacagcagaatcagattggtgatagcaactatacctatcatgaagattttaacaaatttaccacctattttctgggttttcatgaaaatcgcaagaatatttatagcaaagatccgcataaaaccgcactggcatatcgtctgattcatgaaaatttaccgaagttcctggaaaataacaagattctgctgaaaattcaaaatgatcatccgagcctgtgggaacagctgcagaccctgaatcagaccatgccgcagctgtttgatggttgggattttagccagctgatgcaggttagcttttttagcaataccctgacccagaccggtattgatcagtataataccattattggtggtattagcgaaggtgaaaatcgtcagaaaattcagggtattaatgagctgattaacctgtataatcagaaacaggataaaaaaaatcgtgttgcaaaactgaagcagctgtataaacagattctgagcgatcgtagcaccctgagctttctgccggaaaaatttgttgatgataccgaactgtatcatgcaattaatatgttttacctggaacatctgcatcatcagagcatgattaatggtcatagctataccctgctggaacgtgttcagctgctgattaatgaactggcaaattatgatctgagcaaagtttatctggcaccgaatcagctgagcaccgttagccatcagatgtttggtgattttggttatatcggtcgtgccctgaattattattatatgcaggttattcagccggattatgaacagctgctggcaagcgcaaaaaccaccaaaaaaattgaagcaaccgaaaagctgaaaacaattttcctggataccccgcagagcctggttgttattcaggcagcaattgatgaatatattcagctgcagccgagcaccaaaccgcatacccagctgaccgattttattattagcctgctgaaacagtatgaaaccgttgcagatgatcagagcattaaagttattaatgtttttagcgatattgagggtaagtatagctgtatcaaaggtctggttaataccaaaagcgaaagcaaacgtgaagttttacaggatgaaaaactggcaaccgatattaaggccttcatggatgcagtgaataatgttattaaactgctgaagccgtttagcctgaatgaaaagctggttgcaagcgttgaaaaagatgcacgtttttatagcgattttgaagaaatttatcagtctctgctgatttttgttccgctgtataataaagttcgtaattatattacccagaaaccgtatagcaccgaaaaatttaaactgaatttcaataagccgaccctgctgagcggttgggatgcaaataaagaagcagataatctgagcattctgctgcgtaaaaatggtaattattacctggcaattatggataccgcaaaaggtgcaaacaaagcatttgaaccgaagaccttaaatcagctgaaagttgatgatacaaccgattgttatgaaaagatggtttataaactgctgtcaggtccgagcaaaatgtttccgaaagcatttaaagcaaaaaataacgagggtaattattatccgaccccggaactgctgaccagctataataataacgaacacctgaaaaatgataaaaactttaccctggcaagcctgcatgcatatattgattggtgtaaagagtatattaatcgtaacccgagctggcatcagtttaattttaaatttagcccgacccagagctttcaggatattagccagttttatagcgaagttagcagccagagctataaagttcattttcagaccattccgagcgattatattgatcagctggttgcagaaggtaaactgtatctgtttcagatttataataaagatttcagcccgaatgcaaaaggtaaggaaaatctgcataccctgtattttaaagcactgtttagcgatgaaaatttaaaacagccggtttttaaactgagcggtgaagcagaaatgttttatcgtccggcaagcttacagctggcaaataccaccattcataaagcaggtgaaccgatggcagcaaaaaatccgctgaccccgaatgcaacccgtaccctggcatatgatattattaaagatcgtcgttttaccaccgataaatatctgctgcatgttccgattagcctgaattttcatgcacaggaaagcatgagcattaagaaacataatgatctggttcgtcagatgattaaacataatcatcaggatctgcatgttattggtattgatcgtggtgaaaaacatctgctgtatgttagcgttattgatctgaaaggtaatattgtttaccaggaaagcctgaatagcattaagagcgaagcacagaattttgaaaccccgtatcatcagctgctgcagcatcgtgaagaaggtcgtgcacaggcacgtaccgcatggggtaaaatcgaaaatattaaagaactgaaagatggttacctgagccaggttgttcatcgtattcagcagctgattctgaaatacaatgcaattgttatgctggaagacctgaattttggttttaaacgtggtcgttttaaaatcgagaaacagatttatcagaaatttgaaaaggccctgattcataaactgaattatgttgttgataaaagcacccaggcagatgaactgggtggtgttcgtaaagcatatcagctgaccgcaccgtttgaaagctttgaaaagctgggtaaacagagcggtgttctgttttatgttccggcatggaataccagcaaaattgatccggttaccggttttgttgatctgttaaaaccgaaatatgaaaatctggataaagcacaggcattttttaatgcatttgacagcattcattacaatgcacagaaaaactactttgagttcaaagtgaatctgaaacaatttgcaggtctgaaagcacaggccgcacaggcagaatggaccatttgtagctatggtgatgaacgtcatgtttatcagaaaaaaaatgcacagcagggtgaaaccgttattgttaacgtgaccgaagaattaaaagttctgtttgcaaaaaataatattgaagttgcccagagcgttgaactgaaagaaaccatttgtacccagacccaggttgatttttttaaacgtctgatgtggctgctgcaggttctgttagcactgcgttatagcagcagcaaagataaactggattatattctgagcccggttgcaaatgcacagggtgaattttttgatagccgtcatgcaagcgttcagctgccgcaggatagcgatgcaaatggtgcatatcatattgcactgaaaggtctgtgggttattgaacagctgaaagcagcagataatttagataaggttaaactggcaattagcaatgatgattggctgcattttgcacagcagaaaccttatctggcaaaacgtccggcagcgactaagaaggcggggcaagctaagaagaaaaaggggtcgggtcctgctgccaagagggtcaagttggacggcagtggtcatcaccatcatcatcattaa

SEQ ID NO: 694 - DNA, 4080 bp, synthetic construct
  misc_feature 1..4080: note = Sequence codon optimized for E. coli expression
  source 1..4080: mol_type = other DNA
atgaccggtatttttaaagactttacccatctgtatgaactgcagaaaaccctgcgttttgaactgattccggttggtcgtaccaaagaactgctggaaaaaaatcatgtttttgaaaaagatgagaaaattgccgaaaactacaaggatgttaagaagtacttcgatcgtctgcataaagaatttattaaagatgcatttagccataccaatctgccggagaatctgctggaaggttatgaacaaaaatattttagccataaactgaatccgagccgtgcaagccgtattgatctggaaaagattgcaaaacgtctgcgtaccattctgctgaaaagctttaataccgaagcagatcagtggaagaatcgttatctgaagaatatcgaacagaccctgaagaacaaaaacgagaaacagcagaaaaaagaactggaaaaaaaactgaaaaaaattaaggaaggtaccaaaggtatcgaactgttttttaaagttgaggttttcgatttcctgaaatataaatatccggaagcacagattaatggtaagagcatttttgacccgtttaataaatttggttgctattttaaaaagtttcacgaaacccgtatcaatttttataaagatgatggtaccagcaccgcaattccgacccgtatcattaacgacaatctgagcatttttctggaaaataagaaaattttcgaaagcaagtacagcaaaaaacataaaagcgtttttgcaaaaaatgaactgcgtatttttgttctgttttatttcaacaactgtttcagccagaaacagattgatggttacaataataccattgcactgattaatagcaatgttaatcagctgcgtcagaataatccggaagttagcaaaaaagatctgccgttttttaaacgtctgtttaaacaaattctgagccagccgagcaaacaggaaattgaacaggatagctttattgaaatttttcaggatgaagatgtgtttccgaccatgcagaaattcatcaatgaaaacaaaatctgtattccgaaagcaaagagcattttcaaaaaatttatcagcagccagaaagttaaaagcgatgaatataatattagccagatttatgttgcaaaacgctttattaacaccattagcaataaatggtttagcaattggaataccattcgtaatctgctgattccgaaagataaaaaaaacattccggattttatcagcgttaccagcctgaaagcagcattacagaaaacccagaatattgttgaggttaatgacctgtttcgtaaagaatatcgtgatattctggaagaaggtagcgacttctatcagattttcctgaaaatttgggaaaaggaatttgaaaaagcaaccgatatttatctgaatgaaaccaaagaaattgaaaaaatgatcaccgaagataagaaatacctgccgaataaaaaaggtcgtctgaaaagcggtaaaaaaggtagcattcagaaagaaaaatttctggattatacccagagcgtgtttgacatctacctgatgatgaaatatttttctctggaaaaaggtaaagaacgtgtttggaatccggaagcattagatgaagatgcaattggtggtttttacgagaagtttaaagagtattatgaaaatatcaacacctggaagtatttcaacgtttttcgtaattacctgaccaaaaaaccgtataacagcgaaaaaatcaagctgaattttgaatgtagcagcctgctgagcggttggagcaaaaattatgatagctatggtgcactgatttttgaaaaaaatgagaagtactatctgggtatcattaatggtaccaaattcaccaaagacgaaattgaacaactgtatctggatattcgtaacaacaatattagcctgcgtctggtttacaactaccagaaaccggatttcaaaaactttccgaaactgtttattcgtagcagcggtagcaattttgcaccggcagtgaaaaaatataacctgccgattgatagcgttctgaatatttatgataaaggtctgtttaaaaccagcaacaaaagcagccagaattatcatgaaagcctgaaaaagattattgattactttaagctgggtattagccagcatgaaagctataaaggttttagcttcaaatggcaggaaaccagcgaatatgataatattagcgatttctataaagatgcaacccgtagctgttataaagtgacctgggaaaacattaactttagcaaactgtatgaattaattgaaagcggtcgtctgtatctgtttcagatttataataaagattttgaactggacgagaatattgcaccgaaaggttataatttcaaagataaaaatggtcgtcgcaatctgcatagcatttattggaaagcactgtttagcaatacgaactttaaaaagaccattctgaaactgaatggtggtgcagaactgttttatcgtaaactgaccaaaaatctgaccaaagatccgattattaccgttaaaaaccagattaagattatcaagaagaacaacaacatttttcacaagaaacgttttacccagaataaaatctactttcattgtccggttagcattaattttaccgaaaatgactggaaaattaacaccaaaatttgtaacacgattcgtaataacagcaaagtgaaaattattggtattgatcgtggtgaaaaaaatctggcatattatagcgttattgatcatcagggtaatattctggaaaccgatagctttaatgaagttcaggaacgtgaagatcgtgagccgaccgattatcagaaaaaactggatcagattcaaaaagaacgtgattggcagcgtaaaagctggcaggagattagcagcattaaagaaatgaaaaaaggttatattagccaggttgttcatcagatttgtaagctgattcgtaaatatgaggcaattgttgttttcgaagatctgaatattggttttaaacgtggtcgttttgccattgaaaaacagatttatcagaatctggaactggcactggccaaaaaactgaattatatggtttttaaagatgcaaaagaagaagaaaccggtcattttctgcaggcatatcagctgaccccgccggttattaattttcaggatatcggtaaacagtgtggtattattttttatgtgccggcaagctataccagcgcaatttgtccggcatgtggttttcgtaaaaacattagcacctttgttgagaagattgagaaaaacatcgacctgattaataagtttaatatcgtttatgatccggataaagatcgcttttgttttcgttataaacgtagcgattttattaagagcgaaaaagaaaaagaagacgacagcaaagttaaactgtatagcaataccaaactgccggatgactttaccttttatagcaatgttgaacgttttaaatatattcgtgatcagaataatcgtggtggtaaagttgaactgaaatatccgaatgatagcttaaaaaagctgtttcatgaaaatggtatcaattttcagaactttagcaatatcagccagctgattaaaacccgtaattttgagaacgagaacttttacaagccgtttatttacattattagcctgattctgcagctgcgtaacaccaccattgaaatcaaccagaatgaaaataatgaaaaatatcgtgatttcatcagctgtccgcattgttatttccatagcgaaaataatctgattaccctgaccaaacgttataaaggtaaaaaaccgtttgaatttaatggtgatgcaaatggtgcatataacattgcccgcaaaggtattctgattctgcaaaaaattaataaagcaaaacgtcttgaagaaatcgaatatggtggtctgaccgttacccagcaggaatatgataaatatctggcactggttagcagcaaaaaagcaaaacgtccggcagcgactaagaaggcggggcaagctaagaagaaaaaggggtcgggtcctgctgccaagagggtcaagttggacggcagtggtcatcaccatcatcatcattaa

SEQ ID NO: 695 - DNA, 3846 bp, synthetic construct
  misc_feature 1..3846: note = Sequence codon optimized for E. coli expression
  source 1..3846: mol_type = other DNA
atgctgtttgaagcaggtgtttttcgtctgctgaaagaacgttttaaaaatgaaaaggacaccaccgttgatggtaataatatttttgatgaatggacccgttggaccggttactttaaaaaattctttgaaacccgtaaaaacttttataagagcgatgataccagcaccgcaattgcatatcgtgttattaatcagaatctgcgtcgtttttgtgaaaacatccagatttttgagaaaatcagcgaaaaaattgaatttagcgaagttgaaaagagctttgatattagctgtgcaggtatttttagcctggcatattataatgcatgtctgctgcagggtggtattgatacctataataaaattattggtggtgaagttgatgaaaaggataaaaagattccgggtattaatgaactgattaataagtatcgtcaggataatagcggtgaaaaaattccgtttctgaaacagctggataaacagattcatagcgcaaaagaagcatttattgaaagcattgaaaccaataaagaactggttggtaaactgaaaaccttttatgaaaatgcagaagttaagattcagagctttcgtaatctgattgcagatattgtgaccgattatagcggttatgatatcgacaaaatttatctgaccaaagaagcagttagccataatgcaagccgttggtttgcaagctttgaaagctttgaacgtgatctgtttgcagttgttgcagaaaaacagaataaactggtttatgagctgctgcgtacccataaaaatgatagcaaaattagcgataaagacggcaaattcagctttccggattttattaaatgtagccatattaaacgtgcactggaaaaacaggaaggtcgtatttggaaaggtgaatattatgaagatattgttgatttcgagaagattaaggacgtttttacccagtttctgtgtgtttttaaatttgaactggaacaacagttttttcgtaaaaccaccagcgcacagaccggtgaacagaccaaaattggttatgaaatttttgttaccaaaattaatgagctgattacccgtgaaaatccggttattgatctggaagaaaaaattgcaattaagaattttgcagacgcaaccctgctgatttatcagattgccaaatattttgcagttgaaaaacgtcgtggttggctggataattatgatctggatgatcgtttttataaaagcagcgatattggttatctgaatttttatcgtgatgcatttgaacagattgttcgtccgtataatctgtttcgtaattacctgaccaaaaaaccgtataataccaataaatgggttctgagctttgaaaatccgaccctggcagatggttgggataaaaataaagaaaaaaccaatgcagcagttattctgcgtaaagatggtcgctattatctgggtattattaaagaagattgtaaaagcctgtttgcagatcgttatagcaaagaaatgagcgaaggtattgaaagcggtagctttcagaaaatggcatataaattttttccggaagcaagcaaaatgattccgaaatgtagcacccagaccaaaaatgttaaagaacattttcgcaaaagcagcagcgattataatctgttccatgaaaaagattataaaatcagcgttgccatcaccaaaaatatttatgagctgaataatgtgttctaccgtaaagacaatattgaagagagctttgttccgaaaaatgattttgagaaaaagctgggtgttaaaaaatttcagcgtcagtatctggaaattagccgtgataataatggttataaacaggcactggcacagtggattgaattctgtatccgtttcctgaaagcatataaaagcaccaccatttttgattatagccgtctgcgtgaagcaaaagaatatgaaagcctggatgcattttatcaggatattaatgcactgacctataatattagctttgttcccattagcgaacagtatattaaagaaaagaacgacaatggtgaactgtttctgtttgaaatttataataaagattggagcctgggtccgatggataaaaatcgtaaacgtaccaaaaatctgcataccctgtattttgaacagctgtttagcaaagaaaatgaacaggaaaacttcctgtttcagctgaatggtgaagcagaactgttttttcgtccgaaaaccgaagaaaaacgtctgggttataaagtttgggatgcaggtgaaaaaaaatgggtgaaagcaaaagaaaaagaagatggtgcagttattgatcgtaaacgttatgcaaaagatattatcctgtttcattgtccgattaccctgaatcgtgttagcgaaagcaaaaccaaacgtgaaatggatgttgaaattcgtgaagttctgagcagcaccccgggtgttcatattattggtgttgatcgtggtgaaaaacatctggcatattacagcgttatcgatcagaatggtaaaattattgaaaccgataccctgaatagcattggcaaagatggtcgtggtaaaccggttgaatatgcaagcaaactggaaaaacgtgcacaggaacgtgaagcaagccgtcgtgattgggaagaagttgaagcaattaaagacctgaaaaaaggttatattagccaggttattcgtaatctggcagatctgattatcaaacacaacgcaattattgtttttgaagatctgaatatgcgttttaaacagattcgtggtggtattgaaaaaagcgcatatcagcagctggaacgtgcactgattgataaactgagctttctggttaaaaaaggtgaagaagatccgaaacagaccggtcatattctgcgtgcatatcagctggcagcaccggttattgcatttaaagacatgggtaaacagacaggtctgattttttatacccaggcaggttataccagcaaaacctgtccggaatgtggttatcgtcgtaatattaagtgtctgtttgaaaatattgaacaggcaaaaaccctgattgagaatctggaaagcattaattataacaagaaagaggatgtttttcagattagctatagcctggaaaaactgagcagcaaagatcagaaaaaagaaaaaaaagtgagcaatgaactgtatgccaaaaccctgaagaaagatatttttattctgaccaccaaaaatgcactgcgttataaatggtatgatcgttattctgaaaaagcaaaagttgcaaaacgtggtattgatgaatataaaggtgaagttaatgaaagcgaaaccaaaaaaggtgttgttaaagagttcaatctgaccgagtatctgaaaggtctgctgaaaacctatgaaattgattatgaacatggtggtattcgtgaacagattctgagcgttgcacgtggtcgtgaattctataaggactttctgtatgcactgtttttactgaccgaaacccgtcatagcattagcggtcgtaataccgattatattcagtgtcctgaatgtgaatttgatagccgtaaaggttttaaggatattaaagagtttaatggtgatgcaaatggtgcatataatattgcacgtaaaggtattatgatcctggaaaagatcaagcagtttaaaaaagataatgatggcaacctggaaaaaatgggttggggtgatctgagcattagcattgaagaatgggataaatttacccagaaagaaaaacgtccggcagcgactaagaaggcggggcaagctaagaagaaaaaggggtcgggtcctgctgccaagagggtcaagttggacggcagtggtcatcaccatcatcatcattaa

SEQ ID NO: 696 - DNA, 3939 bp, synthetic construct
  misc_feature 1..3939: note = Sequence codon optimized for E. coli expression
  source 1..3939: mol_type = other DNA
atgggaaaaaaccaaaactttcaagagttcatcggcgtttcccctctgcagaaaactcttagaaacgaattgatacccacggaaaccaccaaaaagaatattacacaattggatttgttaacggaggatgaaatacgagcacagaaccgggaaaagctgaaagagatgatggacgattattatcgtgatgttatcgactcaacgttacatgcggggattgcagtggattggagttacttattttcttgcatgcggaaccacctgcgggagaatagcaaggaatccaaacgtgaacttgaacgtacccaagatagcattcgatctcagatctataataagttcgccgaacgcgcggattttaaagatatgtttggcgcctctataataacaaaattattacccacctacatcaaacagaatccggaatattcggagcgatatgatgaatcaatggaaatcctgaagttatatgggaaatttacaacttcactcacagactattttgaaacccgtaagaatatcttttccaaagaaaagataagctcagctgtaggctaccggatagtggaggaaaatgcggaaatatttcttcagaatcagaacgcgtatgatcgcatttgcaagatcgccggcctggacctgcatggtctcgacaatgaaatcactgcgtacgtggacggtaaaaccctgaaggaagtatgtagtgatgaaggtttcgctaaggcaatcacacaagaggggatagaccgttataacgaagctattggggctgtaaatcagtatatgaacttactttgtcaaaagaacaaagcgctcaaaccaggtcagtttaaaatgaaacgtctgcataaacaaatcttgtgtaaaggcacaacatcgtttgacataccgaagaaatttgagaatgataaacaagtttatgatgccgttaactcctttacggaaattgtcatgaaaaacaatgatttgaaacgcctgctgaatataacacagaacgttaatgattatgatatgaacaaaatatatgtggctgcagatgcctactccacaatcagtcagttcatctcgaagaaatggaacttgatagaagaatgcctgctggattattatagtgataacctcccaggcaagggaaatgctaaagagaacaaagtgaaaaaagcagttaaggaagaaacgtaccgtagcgtcagtcaactgaatgagcttatagaaaagtattatgtggagaaaaccggacaaagtgtctggaaggttgaaagttatatatcgcgtctggccgaaacaatcaccctggaactgtgccatgagattgaaaatgacgagaagcataatctcatagaggatgatgataaaatcagcaaaatcaaggaattactcgatatgtatatggatgcctttcatattataaaagttttccgtgtgaatgaggtgttaaatttcgatgaaaccttttactctgagatggatgaaatctaccaggatatgcaagagattgtaccgctgtacaaccacgtacggaattatgtgacacagaaaccgtacaaacaggaaaaataccgtctgtattttaacacacctacgctcgccaatggctggtccaaaaacaaggagtatgataacaatgcgatcatactgatgcgcgatgataaatattaccttggcattttaaacgctaaaaagaaaccgagcaagcaaacaatggcgggtaaagaagattgtcttgagcatgcctatgctaaaatgaattattacctgctcccgggcgcaaataaaatgctccccaaagtatttctgtcgaaaaagggtattcaagattaccatccgtcttcatatatcgtggaaggttacaacgaaaaaaaacacataaaaggttcaaaaaactttgatattcgcttttgtcgcgatctgattgactactttaaagagtgcattaaaaaacatccggattggaataagtttaacttcgagtttagtgccactgagacatatgaagacatatccgttttctaccgcgaggtggaaaagcagggctatcgagtcgaatggacctatataaatagcgaagacattcagaagctggaggaagacggacagctgtttctttttcaaatttacaataaagattttgcagtagggtcgacggggaaacctaacctgcacactttatacctgaaaaacctcttctcagaagaaaacttacgcgacatagtgctgaagttgaatggcgaagctgaaattttttttagaaaatcgtctgtccagaagccagttattcataaatgcggctcaatattagttaacagaacgtatgaaatcactgaaagtggaaccactcgtgtccagagcattccggaatctgaatatatggagttatatcgttattttaattcggaaaaacagatcgaattaagcgatgaggcaaagaagtacttagataaagtacaatgcaacaaggccaaaaccgatatcgtaaaggactaccgctacacaatggataagttttttattcacctgcctataacaattaattttaaggtagataaaggcaataacgtgaatgccattgcccaacaatacattgcggagcaggaggacttgcatgtgattggtatcgaccgaggggaacgcaatttgatttacgtcagcgtaattgatatgtatggacgtattctggagcaaaagtcgtttaatctggtggaacaggtatcaagtcagggcaccaagcggtattacgattataaagaaaaattgcagaatcgtgaagaagaacgtgataaagcccgtaaatcctggaaaacgatagggaaaatcaaagaacttaaagaaggatacttgtcttcggtaatacacgagattgcccagatggtcgtaaagtacaacgctattattgcgatggaagatctgaattacggtttcaagagaggacgtttcaaagtagagcgccaggtttaccaaaaatttgagactatgctgatttctaaattgaattatctggctgataaatcacaggctgttgatgaacccggcggaattctgcgtggttatcagatgacgtatgtgccggataatataaaaaatgttggtcgtcagtgcggcataattttttatgttccggccgcgtatacaagtaaaatagatccgaccactggttttataaatgcatttaaacgtgacgtcgtttccactaacgatgccaaagaaaattttcttatgaaatttgatagtatacagtatgatatagagaagggactgtttaaattctcgtttgattacaaaaattttgccacacacaaattgacgttagcaaaaactaagtgggacgtctacactaatggcacgagaattcaaaatatgaaggttgaaggacactggctttctatggaagtagagttgacaacaaaaatgaaagagcttctggatgattctcacattccgtacgaggaagggcagaatattcttgatgatctgcgtgagatgaaagacattactaccatagtgaacggaattctcgaaatcttttggttaacagtgcagctgcggaattctcgtatagataatccagattatgatcggattatatctccggtgctgaataatgatggtgaattcttcgatagcgatgaatacaacagctatattgatgcccaaaaagcgccactgccaattgatgcagatgcgaatggtgccttctgtatcgcattaaaaggtatgtatactgcgaatcaaattaaagaaaactgggtagagggtgaaaaactgccggcggattgcttgaaaattgaacatgcaagctggctggcgtttatgcaaggcgagcgtggaaaacgtccggcagcgactaagaaggcggggcaagctaagaagaaaaaggggtcgggtcctgctgccaagagggtcaagttggacggcagtggtcatcaccatcatcatcattaa

SEQ ID NO: 697 - DNA, 3954 bp, synthetic construct
  misc_feature 1..3954: note = Sequence codon optimized for E. coli expression
  source 1..3954: mol_type = other DNA
atggaagagaaagaacttggtaaaaatcaaaattttcaagaattcataggagtgagcccgctgcagaaaactttgagaaacgagctgataccgacggaaaccaccaaaaagaatatagcccagttggatctgctgacggaagatgaggtccgtgcccaaaatcgcgaaaaattgaaagaaatgatggacgattattatcgagatgtcatcgacagcacgctgcgcggcgaattactgattgattggtcgtatttattctcttgtatgcgtaatcatctgtccgagaattccaaagaaagtaagcgtgaactggaacgtactcaggatagcgtgcggagccaaattcacgataaatttgcagaacgagctgatttcaaggacatgtttggcgcgtccataattacgaagctcttaccaacgtatattaaacagaattctaagtactcggaacgctatgacgaaagcgtcaaaatcatgaaattgtatggcaaattcacaacgtcactgaccgattactttgagacacgtaaaaatatattttcaaaagagaaaatcagttcggcggtcggttatcggatcgtggaggaaaatgcggagatttttctgcagaaccagaacgcgtacgaccggatttgtaagattgcaggcttagatcttcatggcctggataatgaaattaccgcgtatgttgatggtaaaactttaaaagaggtgtgcagtgacgaaggttttgcaaaggttatcacgcagggtggtattgatcgctacaatgaggcaatcggggcggtgaatcaatacatgaacctgctgtgccagaaaaacaaagcgctgaaaccgggccagttcaagatgaaacgtctgcacaaacagattctgtgtaaaggtacaacgtcttttgacattcctaaaaaattcgagaatgataaacaagtttacgacgctgttaattccttcacagaaattgttaccaagaataatgatttaaaacggctgctgaacattactcagaatgcaaatgattacgatatgaataaaatttatgtggttgccgatgcctattccatgatctcgcagtttatttcaaaaaaatggaatctgattgaagaatgtcttctggactattattccgacaatttaccgggcaaaggtaatgccaaagaaaacaaagttaagaaagcggtaaaggaggaaacgtaccgctccgtctcgcaactgaatgaagtaattgaaaaatactatgtagagaagactggccagtcagtatggaaagtcgaaagctatattagctccctggctgaaatgattaaacttgaactgtgccacgaaatcgataacgatgaaaaacacaaccttatcgaagatgacgaaaaaatttcagaaattaaagaactgctcgatatgtatatggatgtgtttcatattattaaagtgtttcgcgtgaatgaggttttaaattttgatgaaaccttttacagcgagatggacgaaatctatcaggacatgcaagaaatagtaccattgtataaccacgttagaaattatgttacacagaaaccttataagcaggagaaataccgcttatatttccatacccctacgcttgcgaatgggtggagcaaaagcaaagaatatgataacaacgccataatattggtgcgcgaagataaatactatctgggcattctgaatgctaaaaaaaaaccttcgaaagagattatggccggaaaagaagattgtagcgaacacgcatacgcgaaaatgaattactatctgctgccaggtgcgaacaaaatgttacccaaggtgttcctctcaaaaaagggcatacaagattatcaccctagcagttatatcgttgagggttataacgagaaaaaacatattaagggatcaaagaattttgatatacgcttttgtcgcgatctgattgattactttaaagagtgcattaagaaacatccagactggaataaatttaattttgaattcagtgcaactgaaacctatgaggatatcagtgtgttctatcgtgaggtcgaaaaacagggctacagagtcgagtggacgtacattaattcggaagacattcaaaaacttgaagaagatggtcaattatttctgtttcaaatttataataaagactttgccgttggttcgactggtaagcctaacctgcatacgttgtatcttaagaatctcttttctgaagaaaacctgcgtgacattgtgcttaaattaaacggtgaagccgaaatcttttttcgtaagtcatccgttcaaaaaccggttattcacaaatgcggtagcatccttgtgaaccgtacttacgaaataacggagtccggtactacccgcgtccaaagcatcccagaatcagaatatatggaattgtatcgctatttcaactctgaaaaacaaattgaattgtctgatgaagctaaaaagtacctggataaagtacagtgcaacaaggcaaaaaccgacatcgtgaaagattaccgctacacgatggacaaattcttcatccatttacctattacgataaactttaaagttgataaaggtaacaacgtcaacgccattgctcagcagtatattgcggaacaggaagaccttcacgtcatcggtatagatcgtggcgagcgcaacctgatatacgtgagtgttatcgatatgtatggacgtattttggaacaaaaatcatttaaccttgtcgaacaggtcagttcacagggcactaaacgctattatgattacaaagagaagttacagaaccgcgaagaagaacgagacaaggcacgaaaatcttggaaaacaataggtaaaattaaagaactgaaagagggttatttgtcttctgtcatccacgagattgcgcaaatggtagtgaaatataatgcaattatagctatggaggacctgaattacggctttaaacggggcagattcaaagttgagcgccaggtgtatcaaaagtttgaaaccatgttgataagtaaattaaactatctggccgataaatctcaggccgtggatgaaccgggaggcattttgcgcggttaccagatgacgtatgtccccgacaatataaagaatgtggggcgtcaatgcgggattatcttttatgtacccgcggcctacacctcgaaaatcgatccaacaaccgggtttatcaacgcctttaaacgagatgtcgtgtcgaccaacgacgcgaaggagaattttctgatgaagttcgatagtatccagtatgatatagaaaaaggcctgtttaagttttcttttgactacaaaaattttgccactcataaactcaccttagccaaaactaaatgggatgtttatacaaatggcacacgcatccaaaatatgaaagtcgagggtcactggctgtccatggaagtagagctgacaacgaagatgaaagagttgctggatgacagccacatcccatatgaggagggccaaaatattcttgatgatttacgcgagatgaaagatattacaaccattgtcaatggtatcctggaaatcttctggcttaccgtacaattaagaaattcccgcatcgataacccggactatgatagaattatcagtccagtattaaataacgacggtgaattttttgatagcgatgagtataacagttatatagatgcccaaaaggcccctctcccaattgatgctgacgcgaacggagccttttgcatcgccttaaagggcatgtataccgcgaaccaaattaaggaaaactgggttgagggcgagaaacttcctgcagattgtcttaagatcgagcatgcctcctggttagcgtttatgcaaggtgaacgtggaaaacgtccggcagcgactaagaaggcggggcaagctaagaagaaaaaggggtcgggtcctgctgccaagagggtcaagttggacggcagtggtcatcaccatcatcatcattaa

SEQ ID NO: 698 - DNA, 3978 bp, synthetic construct
  misc_feature 1..3978: note = Sequence codon optimized for E. coli expression
  source 1..3978: mol_type = other DNA
atggtgggcaataaaatttccaactcttttgatagcttcaccggaatcaacgcactgagtaaaaccctgcgtaacgaattgattccaagtgactataccaaaagacacattgctgagtcggacttcattgccgctgatactaacaaaaacgaggatcagtatgtcgcaaaagaaatgatggatgactattaccgtgatttcatcagtaaagttttggataatctgcatgatatagaatggaaaaacttgtttgaactgatgcataaagcgaaaatcgataagtccgacgccacgtcaaaggaactcattaaaatacaagatatgctgcggaaaaaaatcgggaagaagtttagccaagacccggaatataaagttatgttatcggccggcatgatcactaagatattaccgaaatatatcttggaaaaatacgaaacggaccgcgaggaccgtcttgaagcaataaaacgtttctacggctttaccgtttattttaaagagttttgggccagcagacagaacgtgtttagtgacaaagccatcgccagtagtatatcgtatagaatcattcatgaaaacgccaagatatatatggataatctggacgcttataacagaatcaaacagatcgcatgtgaggaaatagagaagattgaggaagaagcttacgactttcttcagggtgaccagttggatgtagtctatactgaagaggcctatggcagatttatttcccaatctggtattgacctgtacaacaatatctgtggagtcattaatgctcatatgaacttatattgccagtcaaaaaaatgctcacgatccaaattcaaaatgcaaaaactccacaagcagatcctgtgcaaggccgaaactgggtttgagataccgctgggctttcaagacgacgcacaggttattaatgccataaactcatttaacgctcttattaaagagaaaaatattatttcacgcttgcgtactattggaaaatcaatttctctgtacgatgttaataagatttacatttcgtcaaaagcgtttgaaaacgtgtctgtttatattgatcataagtgggatgtcatcgcgagcagtctgtacaaatacttcagcgaaatcgttaaaggtaacaaagacaatcgtgaagaaaaaatccagaaggaaatcaaaaaagtgaagtcgtgcagtcttggcgacttgcagcgattggttaacagctattataaaatagattcgacctgcctggagcacgaagtgactgagtttgttacaaaaataattgatgaaatagacaacttccaaatcaccgacttcaagtttaacgataagatatcactgatacaaaatgagcaaattgtcatggacatcaaaacttacttggacaaatacatgagtatctatcattggatgaagtcttttgtcattgacgaactggtggataaggacatggaattttatagtgaacttgatgaacttaatgaagatatgtctgaaattgtcaatttatataataaagtgcgtaactatgtgacccagaagccttatagccaggaaaagataaaacttaatttcgggtccccgacgcttgctgatggctggagcaagagcaaagagttcgataacaatgcaattattttgattcgagatgaaaaaatttacctggcgatcttcaacccccgtaacaagccggccaaaaccgttatttcaggtcacgatgtttgtaattcagagacggattataaaaaaatgaactattatttgttaccgggagcaagcaaaactttgcctcatgtctttataaaatcccgtctgtggaatgaatcacatggcattccagacgagattttaagaggctatgagttagggaagcatttaaagagtagtgtcaattttgacgtcgaattctgttggaaacttatcgattactacaaagaatgtatctcatgctaccccaactacaaagcctacaatttcaaatttgctgatacagaaagttataatgacattagcgaattctaccgtgaagtcgaatgccaggggtacaaaatcgactggacgtatattagctctgaagacgttgaacagctggacagagacggccagatttatctctttcagatatacaataaggattttgcgcctaattccaaaggaatggacaacctgcacacgaaatatctgaaaaatatcttcagcgaagacaatctgaaaaatatcgttattaaactcaatggtgaggccgaacttttctatcgtaaatcttctgtgaaaaagaaagttgaacacaaaaagggaacaatccttgttaataaaacctataaagtcgaggacaacactgaaaactccaaagaaaaacgcgttatcattgaaagcgtacctgatgattgctacatggaactggtagactattggagaaatggcggaattggcatactgagcgataaagctgtgcagtataaagacaaagtatctcattatgaagctaccatggacatagttaaagaccgtcgctatacagtagacaagtttttcattcacctgccgattacaataaattttaaagctgatggccgtatcaacatcaacgagaaagtgctcaaatatatagccgagaacgatgaactgcatgtgatcggtattgatagaggtgaacgcaatctgttatatgtgtctgttatcaacaaaaaaggtaaaatcgttgagcaaaaaagctttaacatgatcgaatcctacgagaccgtgactaacattgttagacggtacaattacaaagacaaactcgttaacaaagaatcggcccgtacagatgctcggaaaaattggaaagaaattggtaaaattaaagaaattaaagaaggttacctcagccaggttatacatgaaattagcaaaatggtcctgaaatataatgcgattatcgttatggaggatctgaattacggatttaagcggggccgctttagagtcgaacgtcaggtgtaccaaaaatttgagaacatgttgataagtaagctggcctaccttgtggataaatcgcggaaggccgatgaaccgggtggggtacttcgcggctatcagctgacatacatccctgattcgctggaaaaattaggtagccagtgtgggatcattttctacgttcccgcggcatataccagcaagatcgatccgctcacgggatttgtgaacgtattcaattttagagaatacagcaatttcgaaaccaagttggactttgttcgttcacttgattccattcgctacgacactgaaaagaaactttttagcatcagtttcgattacgataattttaagacacataataccacattggcaaagacaaagtgggtgatttatctccgtggagaacgcattaaaaaagaacacacgtcctatggctggaaagatgacgtatggaatgttgagagccgtatcaaggatcttttcgatagctctcatatgaaatatgatgacggacataacctgatcgaagatatactggaacttgaatcctcggttcaaaagaagctgattaatgagcttattgagattatccgccttactgtccaacttcgtaattccaaatccgaacgttatgatcgcacagaagcggagtacgaccggatagtgtcgcccgttatggacgagaatggtcgtttttatgattcggaaaactacatcttcaatgaggaaacagaactgccaaaagatgccgatgcaaatggagcgtattgtatcgcccttaagggtctgtataacgtcattgcaattaaaaataattggaaggaaggcgaaaagttcaatcgtaaactgcttagcctcaacaattataattggttcgattttatacaaaatcgccggtttaaacgtccggcagcgactaagaaggcggggcaagctaagaagaaaaaggggtcgggtcctgctgccaagagggtcaagttggacggcagtggtcatcaccatcatcatcattaa

SEQ ID NO: 699 - DNA, 3831 bp, synthetic construct
  misc_feature 1..3831: note = Sequence codon optimized for E. coli expression
  source 1..3831: mol_type = other DNA
atgaaagaattcactaacttgtatccagtaagtaagactttacgttttgagttaattccagataaacgcaccaaagaatatttggaacactccgatctcattgctaaggatgaacatcgcgcggagtcgtataagatcgtaaagaagataattgatcgctaccataaaaaattcattgacgacgtgctgtccactacgaaattgcaatatacgaaagagggcaaactgaatagtctggaagatttttattttttgtacaccaattcgaacaaaaccgatgctgacaaaaaggcactggataaggtcaaagagctgttgcggaaacaaatcgttgatgcgttgaaacaggataaccgctttaaacgaatagacaaaaaagaactgattcgtgaggatatcctgcaggtaattaaaccagaagaacgcgcgctgatagatgagttccaggattttactacgtattttacagggtttcatgaaaacagaaaaaatatgtatagcgctgaagcccaatccactgctattgcgtaccgtctgattcatgaaaatcttccaaaattcgtagacaatatagcaatttttcaaaaaatcttaaaaagtccaattgcggaaaacttaccaaccttgtataaagatatggaggaatacttgaacgtaaattccattgaagaaatgtttatgttagattactacagtgatgtattgacacagccgcaaatagaggtatataatgccatcattggaggcagaactctggaagatggtacaaaaatacagggcgtcaacgaatttgtcaatttgtttaatcaacaacaaacgagtcgggataatcgtttacctaagttaaagcctttgtttaagcagatactgtctgataaagaagcgattagctggttgcccgaagaatttgaatccgatcagcagcttctgaacgccgttcgcgaattttatatcagccttaccaacaacgttatgcagcaattaaaggaacttcttctgaacctgcctaattacaacctggacaaaatttacatcccgaatgatttagctctgacagatattagtcaagctctgtatggggattggtcagttataaaaaatcgtatttacgaggactttaagaatgagaatccgcagaaaaagaatgaaaagacggaaaaatacgaggaaagaatttcaaaacttattaaagaaaaagacatttttaatattggttacctgaactcgtgccttaccaatcagactaaagacgtttgtgcacactttacgtctcttggtgccgttaacacggaggcgaagcaaactgaaaatattttcctgcaaattgaaaatgcatatacggatgtccgtgaattacttgaatatgactatccgcaggacaaaaacctgtcgcaggatcgaatacaagtcaacaaacttaaaacattactggatgcaattaaaaaccttcaacacttcgtgaagccactgctggataccgagaacgaagcggaaaaagacgaaagattttatggcgagttatcagtcctgggagaagaattgaatcgtattactcctctgtacaataaggttcggaatcgcatgacacggaaaccctactcgattgaaaaatttaagctgaattttgagaacagtacgctgctggacgggtgggacgtgaataaagagcgcgataattcctgtgtgatcttacgtcggaatggattgtactttcttgccattatgcgtaaagacagcaataagattttcagtgatgctccagttggcgacggcaaggattactacgagaaaatggaatacaaactgttgccaggtgctaacaaaatgctgccaaaggttttttttagtaaatctcggattgacgaattttgtcctagccctagtttacttgaacattatgagcagggcacgcataagaagggtgaaaagtttagcttgaaggattgtcatgaattaatagattttttcaaaaccagtatcaagaaacacaaagactggtcacagttcaatttcaagttttcgccgaccgagagttacgaagatctttcaggtttctaccgtgaagttgagcagatgggatataaaatcacgtataaaaacatccccgtctcttacattgatacaatggtcagcaaaggacgtcttttcctgtttcaaatttataataaggacttctctccatactcaaaaggaactccaaatcttcataccctgtattggaaaatggtgtttgatgaacagaatctggccgatgtagtatataaacttaatggtcaggcagaaatattctatcgtaaaaagtcgttaaacttaggcaaggtgacacaccctgcaaatcaggcgattaaaaataaaaaccagctgaaccctaaaaaagaatcatcgtttaaatatgacctgattaaggataagcggttcacggttgataaattccaatttcatgtcccgataactatcaactttaaagcgattggccttggcaatataaatcagtctgttaacaagtatatccagaattctccggacttacatataatcggtatagaccggggggagagacaccttctttatataaccgttattgattctaaaggtaatatcaaggaacagttctctctcaatcaaatcgtaaatatgcataaaggcaatacttatgagaccgattatcacgaactgttagacaaacgtgaggaggaacgtcaaaaggaacggcagtcctggaatacaatcgagagcattaaagaattgaagcagggatatctttcacaagtaattcataaggttgtgacattaatggtaaaatataaagccattgttgttttagaagatttgaatatgggctttaaacgcggacgtcagaaggtagagagctcagtgtaccaacagtttgagaaggccctcattgaaaagcttaactaccttgctgataaacagcagaatccgaatgaatacgggggtcttctgaaaggtttccagttgacgaataaatttacttcattccgggagatgggaaaacagaatggatttctcttttatatcccagcatggaacacttcgaaaatcgatccggtgaccggcttcgtagatttgcttcatcctaagtatgaatcagttgaaaaagcgcgtgcatttatctgtaaatttaaaaacatccgttttaatgagaataaaggatggtacgaatttgtttttgattataatgattttaccactaaagcagaggggacccaaactacatggacattgtgcacgcagggatccagaatcgaaacatttcgcaacaaagagaaaaactcaagttgggataatcgggaaattaatctcactaaagaattccactccctgttcgagagctgcggcattgcaccgaacgaaaatcttaaagaagtgattgcaaaacagaccgaaaaatcgttttatgaacgcctcttaaaattgttaaatttaacgttacaaatgagaaacagtatcaccggtacggatatcgattatttaatttctccggtagctaatacggatgggaagttttatgatagccgtaactgcaaagatagccttccggaaaacgctgatgcgaacggggcctacaatatcgcacgaaaggggctttgggtggtccgacagattcagcaggccgccaataccgataaggtccagttctcgatcacaaataaagaatggctcaacttcgctcaaacgaaaccgtacttaaatgataaacgtccggcagcgactaagaaggcggggcaagctaagaagaaaaaggggtcgggtcctgctgccaagagggtcaagttggacggcagtggtcatcaccatcatcatcattaa

SEQ ID NO: 700 - DNA, 3897 bp, synthetic construct
  misc_feature 1..3897: note = Sequence codon optimized for E. coli expression
  source 1..3897: mol_type = other DNA
atgaaacaatttactaatctgtaccaactgagcaaaacgctgagattcgaactgaaacctatagggaaaactaaagagaatatcgaaaaaaacggaattctggaacgcgataaccaacgcgacattgcttacaaggcggtaaagaaagtgattgatgagtatcacaaagcttttatagaaatgatgttgaatgactttgagttacaatatgagttacttgaggagtatcatcacttatatcatattagcaattcagaagaaccgaaaaaaaaagagaaacttcaaaagatccaagaaaatttgcggaaacagatttctgaccgtttcacgaaatccgaacaatataagcggttatttggcaaagaattaatcaaggaagatctctccgagtttgtaaaaacaccccagttcggtaattatattcgcgcgcagaagggtgatgaatataccgacgagcaagttcgccagattcaagaacgaacgttagaagatatagatcaatttaaagattttacgacgtactttagtggttttcatcagaaccgccagaacatgtacgtggcagacgataaagcgacctcgattgctcatcgcatgatcgacgagaacctgccgaagtttattgataacatgaaaacctttgccgagattgctgaatctgatgtagcggagcattttgctgatctctacaaagaaatggagtcctacctcaacgtgagcgacatccgcgaaatgtttcagttagactatttttccatggttttgacgcaaaaacaaatcgatgtttataatgcgattataggcggtaagaccttagccgacggtaccaaaatacagggtctgaatgaatacgtaaacctgtacaatcagcaacaaaagaaaaaagaggaccgcttacctaaactcaaaccattgtttaagcagattttgagcgaacggaatgctatttcttggttacctgaagaatttaaagacgacaatgaaatgcttcagtcaatagggaaatgttatcaggacctgaatacattagttttcggtaaactgaagaccttacttgagacactgaatgattttgacctggataatatttatcttcccaacgacttgcagcttaccgatatcgcacaaaagcactatgggtcctgggccgtgataaataaagccattgaagaagacctgaaaaccgttaatcctcagaagaaacgcgaaagtggggagaagtacgaagaacgaatagccaagctgttaaaagctaatgactcatatagtattggatatattaattctttgctgaaggaccgtatggaggactttaaaccacttgaagcctacttttctaacattggtgctgaagacgatggaaaacaacagaaacttagccactttgcacgcatcgaaaatgcctacacagaggctaagtctctgctgaccgcagaatatccggatgataaaaagctttcccaggacaaagcaaacgttgaaaaaatcaaaaatttattagacgctattaaggatttacagcgcttcgtgaagcccttattgggctgtggaacagagtcggataaagattcacatttttatggagagtttacaccgctttgggaacagttagatcagatcactccgttatataacatggtccgaaatcgtatgacacaaaaagcttattctgttgaaaagatcaaaatcaactttgataattctacattgctggcaggttgggacttaaataaagaggcagataacacttgtacattgctgcgaaaagatggcttgtattatttagttatcatggataaaagcaatagcagagtgctgaaggccgaaaacctgcttagtgacggggattgttacgagaagatggaatacaaactgttaccgggcgcaaataagatgttgccgaaagttttcttttcaaagtctcgtattggagaatttcagccctccgagtctgtcttagaaaactacaaaaacgaaacgcacaaaaaaggggataattttaacatcgatcactgccacgaactcattaacttttttaaaaaatcgatcggcaaacatgaagactggagcaagttcggttttaaattttcagacacccgtacctatcaggatctgtcaggtttttaccgggaagttgaacaacagggttataagataaccttccgaaatgtttctgtggattatatcaatcagttagtcgatgaaggtaaaatatacctttttcagatctacaacaaagattttagcccgtatagtaaagggacgccgaacatgcataccctgtattggaaaatgttatttgatgagcgcaacctcgcggatgtagtctataaactcaatggcgaagctgaagtgttcttccggaaaaagtccgttaaagtggaacgtcctacacatcctgcgaatcagccgatcgccaataagaacgcgcaaaataacaaaaaagagtctaccttcgcatatgacctgatcaaggaccgaagatatactgttgataaattccagttccacgtaccgataaccatgaattttaaagcagccggtctgaataacataaacccccttgtgaatgaatacctgaaaatgtccaacaccacacatattattggtattgaccgtggcgaacgtcacctgttgtacctgtctctgatagatttaaagggaaatatcgtcgaacaatactctctgaatgaaattgggaacatttaccctacaaattatcgggacctgctcaacgcaaaagagaaacagcgagacgaagctcgccgttcatggcaaactatcgagaatatcaaggagttgaaggaaggttatatgtcccaggtagttcacaagattgcgcaactgatgctgaagtacaacgctattgttgttctggaggatttgaactttggctttatgagaggaagacaaaaggtagaaaaaaatgtctatcagaagttcgaaaagatgctgatagacaagttaaactatctggtggataagaaactggatgccgatgccatgggcggggtgctgaatgcttaccaattaacaaacacgtataaagtatttcatgaccaatacaaaaaacagcaaaatacaatagggaaacaatgtggatttttgttttacattcccgcgtggaatacatcaaaaatggatccgactacgggtttcgttaatctgctcgatacacgctatgagaacatggaaaaagccaaagcgttctttggaaaatttgattcgattcgctatgacgcacttaaggattggtttgaatttgcattcgattataacaattttcataataaagccgaaggtacaagaacccaatggacgttatgcacctatggcacacgtattgaaactaaacgcgacgccgctcagaataataattttgtgtcgacggaagtagatttaacgcagaaattcaaggccttattcgctgagaaacaaattaatccgagtggtaacctgaaagaacaaatttgcaatcagaccgatgcaagcttttttaaatcgttattgaacttattacgtctgaccttgcaaatgagaaacagtataacaggaacggagactgattacctgatatctcccgtacaaaacgctaacggggaattctatgatagtagaaaatgcgatgccaacttaccggagaacgcagacgcaaacggtgcatataatatcgcgcgaaaaggcctgtgggttattgaacaaatgaagcaagctgacgatctttcgaatattaaattggcgataagcaataaagaatggttaagaagtgcgcagaaactggaaaaacgtccggcagcgactaagaaggcggggcaagctaagaagaaaaaggggtcgggtcctgctgccaagagggtcaagttggacggcagtggtcatcaccatcatcatcattaa

SEQ ID NO: 701 - DNA, 3867 bp, synthetic construct
  misc_feature 1..3867: note = Sequence codon optimized for E. coli expression
  source 1..3867: mol_type = other DNA
atgaaagatttaaaacggtttataggaatatacccagtctcgaaaactttgagatttgaactgagaccggtggggaaaacgctcgaatggatcgagaaaaataaggtactggagtcagatgagcaaaaagctgaggattatcctaaagtgaagacgctgatcgacgagtatcataaagtttgtatccgtgaaagtctgaaagatgcacactttgattggatgcccctgcgacttgcgctggaaaaataccagaaatcgaaatcggatgaggacaaagcagcgttagaaaaagaacaggctgttatgcgcaagcaaatcgcaacggctatcaaggaatttcgacattacaaagagttgaccgcacctacgcctcagaaacttatcgataatgtatttcccggtatttacgagtctgatgcgctgaaatcctttaatcgcttctcagtctatttccgtggtttccaagaaaaccgcaataatatatattcggccgaagcgatatctactggcgttccgtatcgcctggttcacgacaactttccgaaatttttagctgatattgaggtgttcggtaacataaaagctaattgcccggaagtaatcgaacaggcagcaaccgagctgcaaccaatattggagggtgttatgctggaagacatctttacgatcgatttttataattctcttctcacgcaggacggcattgatttctttaatcaagtattaggcggcaccgcagaagaagataaacagaaatatcgcggtatcaacgaattctccaatctttatagacagcagcatccggagctgacggccaagaaaaaggccttaaccatgattccactttttaaacagatcttgagtgatagagacaccctttcttatattccacagcagattgagagtgagcagcaacttattgaactgctgaatcaattttacagccatatcactgcattcgatcataacggcaaaactgtagatgttcttaaagagttaactaaattaacaggcaatattaataattacaatcccgatggtatatacctgtcggcgaaatcgttaactgacgtgtcacagaaactgttttctaaatggaatatcattaccgaacgtctgagtgaagaagccatcaaacgttttggagacgtgtcaattactaaaaacaaaaagaagattgatgcgtatctgtctaaggacgcatacgcgcttagtgaaatccctctggacaatgaacactctttgtctatgttttttgcggagttaccgaaaaatatagaaaatgtgggtagcaattggctgcagtttatggagtggtgcaaaggtgaatcaaaacagctttttctgaacaatgccgacggcacagagattgtgaaaaattttctggactcgataatggaaattttgcaccgttgcagcgtcttggtcgtgagtgtggaacatgatctggataaggatttctataatgattttctgccgctgtatgcggaactggaaaacgccgttatggtctataaccgggttcgaaacttcttaactaaaaaaccgtccgatacgaaaaaatttaaattaaattttggtgtgccttctctgggcgatggctgggaccagaacaaagaacgcgacaataaagcaattattctgtttaaagatggcaaatcatatttgggaatcatgaacgcaaaagatatgcctatgatcaaagaacggaatgaatcgaccccgtctagttataagaagatgatttataaactcctggcagatcccgcaaaagattttccgcacaccttttttagtaaaaaaggtatagacacataccaccccagctggtatatactggacggtcgcgaacagggaaagtataagaagggcgaaacgttcgacaaaaaattcatgagagacttcatcgatttttataaagatgccgtcgctaaacatccaatctggtctaaattcaattttgtttattcccctaccgagagctatgaagacattggtgccttcttcaatgaagttagtaaacaagcgtataagattcgcttcagctatatagaagaatcgcagatcaacgaatggattaacaatggtcagctgtacctgtttcagctgtacaataaagactatgcggaaggggcaagagggcgaaaaaatttgcacacattatattgggaaagcatttttagccctgaaaatttaagcaatattgtccttaaactgaatggacaggctgaactgttctacagaccgcagagtataaaacagcctgtcacccataaaatgggtagcaaaatgttgaatcgacgggataaatctgggatgcctattccggaggctatctaccgatcactgtatttgtacttcaattctaagaagaccgagtccgaattaacattagtggagaaatcttacctggatcaagtagttgttaaagacgtgacgcacgaaattgtcaaggaccgccggtatacaaaaccggaattcttctttcacgtcccgataactttcaatgttaatgctgatgggaatgaatacatcaacgagcaagtcatggaatatttgaaagacaatccagacgtgaacatcattgggatcgatcgaggcgagcgtcaccttatatacctgacacttattaaccagcggggtgagattctgaaacaaaagacattcaacatggtaggtaattataactatcacgccaaacttgagcaacgtgaacaggaacgtgatcaggcgcggagaagctggcaatctattgggagaataaaagaattaaaagagggatttctttctgccgtgatacatgaaatcaccatgatgatgatcgaaaataatgccatagtagtcctggaagatctgaatttcgggtttaaacgcggtcgtttcaaagtggaacgtcaggtttatcagaagtttgaaaaaatgctgatcgataaattgaattacctgtcattcaaagatcgtaaaacggatgatgcagggggtattttacgtggttaccagttagcgcaacagtttacatcttttcagcgcctcgggaaacagagtggctttctgttctatattcctgcagcttatacatccaagatagacccagttacgggctttgtcaatcactttaattttaacgatattacgaacgcggaaaaacgaaaagcattctttatgaaaatggaacgtattgagatgcgcaacggtgacattgaattcgaattcgactatcggaagtataaaacatatcaaaccgattaccaaaatatatggaccgtgaatagtagcggtaagcgcattgtgatgagactggatgaaaatggacgcaaaaaaatgaccgattattatcctactcaggaaattgtccgcgcgttcaaagagaaaggtatgcttttaaatgaaggagccgacattaaagccctgttagctgatatcgatgcaagtccgatgaacgcaagcctttatggagtaatgttctacgcatttcaaaagaccctgcaaatgcgtaattcgaattccacaactgaggaagactatatactctcaccagtcgcgcaaaatggcaaacagtttaatactgatactgaagccaataagggccgtgatacaaatggtaactggattagtaagttacctgttgacgcagatgcgaacggcgcctaccatattgcgctgaaaggcttatatttgctgatgaacccccaaacgaaaaaaattgagaatgaaaaatggctgcagtttatggtacaaaagccttataatgataaacgtccggcagcgactaagaaggcggggcaagctaagaagaaaaaggggtcgggtcctgctgccaagagggtcaagttggacggcagtggtcatcaccatcatcatcattaa

SEQ ID NO: 702 - DNA, 3843 bp, synthetic construct
  misc_feature 1..3843: note = Sequence codon optimized for E. coli expression
  source 1..3843: mol_type = other DNA
atgaaaacgtttaatgatctgacgggactgtattcccttagcaaaacacttcgctttgaactgaaaccggtgggcaaaactaaggacaacattgaaaccaaaggcataatcgctcaggatgaaaaacgcgcagaagagtataagaaagttaaggacatcattgacagataccacaagaagttcattgaaatgtgcctcgctaatctgaagcttaaaaccatttctgatggaaataatgactcactgaaggagtatgtgacgcttgcaagtaaagcaaacaaagacgaaaaagaagataacgactttaaagatgttaaaacggcgctccgtaagcagattgtagacgcctttaaaaaggggggttcttattctgatctttttaaaaaagaattgattcaagtccatcttccggattttgtcaccgacgaacaggaaaagcagatggtcgagaactttgggaaattcacaacatattttactggctttaatgagaatcgtcaaaacatgtattccgacgaagaaaaatctacctccatagcgtatcggcttattcatgaaaacctgccaatgttcattgataatattaaatcatttgccaagatagcagagcatgaagatatcgattttctccccgatattgagaatggcttcaaagaagaattaaagcgccttaaagcacagtcgatatctgaagtgttcgaccttgcaaatttcaccaataccctgacgcagtcacagattgattcgtataacgcaattattggtgccagacacgacgagaatggtgacaaggttcaaggcattaatcagtatgtaaatctctataaccagaaaaataaagacgctcgtttaccattacttaaacctttgtataaaatgattctgagtgatcgtggggccctgtcgtggttgcctgaagaattcgctaccgatgaggaaatgctggcggcaattaatgagacacacgggaatctgaagaacgttatgacagatgttcgtaaacttttacagaatattgacagttatgacactgagcacatatatattgccaatgataagggtctgacagacattagtcagcagatttttggtcagtatgatgtctacacctccgcgatcaaagcggagctgagagatagcattaccccaagcgcaaaagaacgcaaagatccagaattgctcgaaaagcgtataaatgacatttttaaggcgtcaaaatcgttttcgatcgaatatttaaactcgcacgttgattccgacaaaacaattcagtcctactataaagagcttggtgcgtacgatcggaatggagaacagcgtattaacctgttttcgcagattgagcttgcctatgtggatgcacatgatgtactgctgggtaaacacaccaatttaaatcagagtgaagacagcatcaagaagataaaagctttactggatgcctataaagccctgctgcactttatcaaaccgttactcggtaatggcgatgaggccgacaaagataatgaattcgatgcaaaattgcgagcaatctgggatgaactggatatagtcacaccattatacgacaaagttcgcaatcggctgactcgcaagccctacagcacagaaaagataaagctcaacttcgacaacgcgcagctgttaaatggttgggatatgaataaagaaccggattgtacgtcggttttgttgagaaaggacgggcagtattatctcgcaattatggataaaaagtcaaatcatgcatttgatattgacgagttaccttgcaatggagaatgttacgacaaaatggactataaattgctgccgggtgctaataagatgcttcctaaagtttttttttcaaaaagccgcattaaggagtttgcgccttctaaggaaatctgcgacgcgtaccagaaaggtacccataaaaaaggtgctaattttagtatcaaagattgccgtcgcctgatcgattttttcaaagattctattgccaagcatgaagattggtcaaagtttccatttactttcagtgatacctcaacgtatgaagacataagcggcttttatcgtgaagtggaacaacaaggttatatgcttgggtaccgtaaagtttcagttagctttatcaatcagttggtggacgaaggaaaactgtatttattccagatatggaacaaagatttttcggagtactccatgggtaccccaaatatgcatacgctgtattggaaaatgttgtttgacgagcgcaacctggcgaacgtggtatacaaactcaatgggcaggcagaggtattttatcggaaaaaatcgcttgatctgaacaaaacgactatacaccgcgcaaatcagcccattgcgaataaaaatatgcaaaatgaaaaacgcgaaagtaccttttgctacgatatagtaaaaaaccgccgctacaccgttgataaatttcagttccatgtgcctatcaccattaacttcaaagccaccggtagtgataacatcaacgcatctgtcctggacgtgatccgtaacaacggaattgaacatatcattggaattgaccgtggtgagcgccatttactgtatctcagtctgatcgatatgaagggtaatatcgtaaaacagatgaccctgaacgacattattaatgaatataaaggcaacacttatacgacgaattataaagagctgctgcaggcaagagaaggtgatcgaaaggaggcgcgccagaactggcagaaaattgagaacataaaggagctgaaagaagggtacttaagtcaggtggttcatgtgattacgaaaatgatggttgagtataaagccatagtagtattggaagatttaaatggtgggttcatgagagggcgacagaaaatcgagcgtcaggtttacgagaaatttgagaagatgcttattgacaaactgaactattatgtggacaaacagcgggacgcgaacgaaaatggcggtttgctccatgcctatcaattggcttctaaattcgatacctttaaaaaacttggtaaacaaagcggatgtctgttttatattccggcctggaatacatccaaaatagacccggttacagggtttgtcaatatgctggatactcgttatgagaatgctgataaagcgagaaactttttctctaagttcaagtctatcaactacaatgcggataaaaattggttcgaattcgttattgacgattactcaaaatttactgacaaagcgaaagatacgagaactgactgggtgctttgcacctatggtacgcgaataaagacattcagaaatccggaaaagttaaatcaatgggataacaaagaaatagttttgactgacgaattcaaaaaagttttcatggaagccggtatagatataaacggtaatctgaaggaggctatttgtaccctgaccgaaaagaaacacctggaatctctgatgcaattaatgaaattactggtccaaatgcgtaacagtgagacaaactcggaggttgattacctgctgtcgccggttgcagatacagagggccatttctatgactctcgcaattgcggcgataaccttccgaaggacgcagatgcaaatggggcatataacattgcccgtaaagggctgtgggccgttatgaagataaaagcctcaaagccgcaggagaatcttaaattagggataagcaataaagaatggcttcagtttgcccaagaaaaaccatatttgaacgataaacgtccggcagcgactaagaaggcggggcaagctaagaagaaaaaggggtcgggtcctgctgccaagagggtcaagttggacggcagtggtcatcaccatcatcatcattaa

SEQ ID NO: 703 - DNA, 3729 bp, synthetic construct
  misc_feature 1..3729: note = Sequence codon optimized for E. coli expression
  source 1..3729: mol_type = other DNA
atgtattatcagggcctcacgaaactgtatcctatctcaaaaacgataagaaacgagctgattccagttgggaaaactctcgaacacattcgcatgaataacatactggaagcggatattcaacgcaagtcggattacgaacgtgtaaaaaaactgatggatgactatcataaacagttgattaatgagtcactgcaggatgttcacctcagttacgtggaagaagccgccgacctctatctgaacgcgtccaaggataaagatatcgtggataagttctcaaaatgccaagacaaattacgtaaggagattgtcaatcttctgaagagccacgagaacttccctaaaattggcaacaaagaaatcattaaattactccaatccttgtccgatacagagaaagactataatgctttggattcttttagcaaattttacacctattttactagttacaacgaggtgcggaaaaacttatactctgatgaagaaaaatcttcaacggctgcatatcgtctgattaatgaaaatttgccaaaatttcttgataatattaaggcttatagcattgccaaatcggcaggtgttcgcgcaaaagagttgaccgaagaagaacaagattgccttttcatgacggaaacttttgaacgtaccttaactcaggatggtatagacaattataatgagcttattggtaaattaaattttgctatcaacctctataaccagcagaacaataaactgaagggtttccgtaaagttcctaaaatgaaagaattatacaaacaaattctgtcggagagagaagcctcatttgttgacgaatttgtcgatgatgaagcactgcttaccaatgtagaatccttttccgcccacataaaagaatttttagagtcagattccctgagtcgctttgcggaagtgcttgaagaatctggcggcgaaatggtttacatcaaaaatgatacgagcaaaaccaccttttctaacatcgtcttcggcagctggaatgtcattgatgagcgcctggccgaagagtacgatagtgcgaacagtaagaaaaaaaaagacgaaaaatactatgacaaacggcataaagaacttaaaaaaaataaatcttactctgttgagaaaatcgtcagtttgtccacagagacggaagacgttattggcaaatatatagagaaattacaggcagacattatcgccatcaaagaaacacgtgaagtcttcgaaaaagttgtgcttaaggagcatgacaaaaacaaatctctgcggaaaaacacaaaggcaattgaggcgatcaaatcctttctcgatacgattaaagattttgaacgggatattaagttgattagtggttccgaacatgaaatggagaaaaacctggctgtatatgccgagcaagagaatatattgtcttccatccgcaatgtggattctttatacaacatgtctcgtaattatttgactcagaaaccttttagtacagaaaaattcaaattaaatttcaatcgagccacactgttaaatggatgggataaaaataaagagacggataacttaggcattttgctggtgaaggaaggcaaatattatctgggtatcatgaatactaaagcaaataaaagttttgtaaatccacccaaacctaaaaccgacaatgtatatcataaagtcaattataaactgctgcccggcccaaacaaaatgcttccgaaagtttttttcgcaaaatccaacctggaatattataagccgagtgaagatttgctcgccaaatatcaggcaggtactcataagaaaggggaaaattttagcttagaagattgtcattccctgatcagtttctttaaagactctctggaaaaacatccggactggtctgagtttggattcaaattttctgatactaaaaagtacgatgatttatccggtttctaccgagaagtagagaaacaaggttataagataacgtacacggatatcgacgttgaatacatcgatagccttgtggaaaaagatgaactgtacctctttcaaatttataataaagatttttccccttattccaagggcaactacaacctgcataccttatatctgactatgctttttgatgaacgtaaccttcgtaatgtcgtatataaattaaacggggaagctgaggttttctatagaccggcgtccataggtaaggatgaattgattattcataaatccggagaggaaattaaaaataagaatccgaagagagcgatcgacaagcctacgagtacgtttgagtatgacatagttaaagatcgacgctatacgaaagataaatttatgcttcatatacccgtcacaatgaacttcggtgtggatgaaacgcgccggtttaatgaagtcgtaaacgatgctattagaggcgatgataaagtgcgggtgatcggtattgatcgcggtgaacggaatctgctgtatgttgtagttgtggatagtgatgggacaatcttagaacaaatcagcttgaatagtattattaacaatgagtattccatagaaaccgactatcataagctcctcgacgagaaagaaggcgaccgagaccgcgcacgtaaaaattggactactattgagaatatcaaagagctgaaggaaggctacctttcacaagtggttaatgttattgcaaagctggtcttgaaatatgatgccattatctgccttgaagacttaaatttcgggttcaaacgcggccgtcagaaggtggagaagcaggtgtatcagaaattcgaaaagatgctgattgacaaactgaattacctggtcatagataaatcgcgtagtcaagaaaatccggaagaagtgggtcacgtcttaaatgccttacagctgacaagtaagttcacaagcttcaaagaactcggtaagcaaacaggcattatatactatgttccggcttatctgacctcgaaaatagacccgacaaccggctttgccaatcttttttacgtgaaatatgaaagtgtggagaaaagcaaagattttttcaatcgctttgactctatatgcttcaacaaagttgctgggtattttgaattttcttttgattataaaaattttaccgatagagcttgtggtatgcggagtaaatggaaggtctgtaccaatggagagcgtatcattaaataccggaacgaggaaaaaaattcttcattcgatgataaagtaattgtgttgactgaagagttcaagaaattgttcaacgagtatggcattgcgtttaacgactgtatggacctgacggatgcaattaacgcgatcgatgacgcgtcttttttcagaaaactgactaagctgtttcaacagactttacagatgagaaatagcagcgcagacggttcacgtgactatataataagcccggtggaaaatgacaatggcgaattttttaattcagagaaatgcgataaatcaaaacccaaagatgctgatgcaaatggtgcgtttaatatcgcgcgtaagggcctgtgggtgttagaacaattatataactcatcctcaggagagaagttaaatctggctatgacaaatgcagaatggctggaatatgcgcaacagcacactatcaaacgtccggcagcgactaagaaggcggggcaagctaagaagaaaaaggggtcgggtcctgctgccaagagggtcaagttggacggcagtggtcatcaccatcatcatcattaa

SEQ ID NO: 704 - DNA, 3846 bp, synthetic construct
  misc_feature 1..3846: note = Sequence codon optimized for E. coli expression
  source 1..3846: mol_type = other DNA
atgaaagatctgaaacaattcatagggatctacccagtcagcaaaaccctccgttttgaactgaaaccgattggtaagacacaagaatggattgaaaagaaccatgttttagagcatgattggaaacgcactgaagactatccaaaggtcaaagaaatgattgacgcatatcataagctgtgtattggtaaatctttgaaaaatatggattttgactgggtgccgcttcgagatgcgatcgaacgcaatcgtcaggaaaagtccgacgggtccaagaaagccttagaagcagaacaaacgaaaatgcgaaacaaaattcatgaccagttatcgaagttcgagcattacaagaagttaaacgcagatacaccgagtctgctgattaaccatattcttccgcaggaagatgccctggagagtttcaaaaaatttgccacatattttgaaggtttccaaaaaaatcgtaaaaatatttacagcaaagaagccatttctacaggtgttccatatagattggtacatgacaactttcctaaattccttgcgaatatagaagtttttgaaaatctgcaagaactgtgcccagaggtcatccaacaggcagctactgaaatggcgcctttcctgcaaggcgttatgatcgaagatgtatttacagtgggtttctataatacaatcctgactcaagatgggatagatttctataaccagattctgggaggcgttgtgaaggacgagcgtcattatcagggcattaaccagcttaccaatctttatcgccaggcccatccggatctcacggcgaaccgccgctcgatgaccatggtgccactttttaaacaaatcttaagcgatcgcgaaaccttaagtgacatcagcaaaccaattgagtcagaagagcagctgattaagactgtaacatcattctaccgtcgtatcactgacttcacattgaatggaaactgtgtcaacattataagcgaacttgctgctttggcacagtctctgaacacatataacccagaagggatttttataagtgccaaaagcttaactgacgtaagccataccctgtatgggcactggaataaattaaatgaaaagttatatgagaaagcggtggaggccatcggcgacatacaggtggcgaaaaatcggaagaaggtagaagcatatttaaacaaagatgcttatactttgtctgagctgagcttcggagatgatatttctttagcgcagtattttactagcattagcgcagcatcgggtgcaaccaatagcctgtgggttcagttccagagctggtgcaaaaccgctgagaaacctaagtatgttcataatgaagccggtacagagctggtaaaaatgttacttgatagcatcatgaacgtccttcacaaatgttctgccttagttgtcagcatggagaatgatctggataaagatttttataataagtttttacccctgtatgcggaactggaaaacgtaattctggtatacaatagagttcgtaatttcttaacacagaaaccctctagtaccggtaaaatcaaactgaaatttgatatacctagtctgggggctggatggggaatcaataaggagaaaaagaacaaagcaattctgctcttcaaagacggtcggtcttatttaggtatcatgaatgttaaaggtaccttggactttgacgataaagcagagccgggcgaacccacgtacaagaaaatggtgtgcgtgaaccacagcaaaccatacatggacctcccgaatagtttctttcggcagaccggcatagataaatataaaccgtctgaacgcattttaaaaatttacgaagcgtttaagaaggatagtaaatcggtggatattaaggaggttcgtggcttaattgattattacaaagaagccataacacgcaatgaagattggaactcagtatcatttacctactcgcctactgagacttatgaaaccattgatgacttctataaagaagttgcgaagcagtcatatcaagtgagcttcaaagatatttctcagaaactggttgatgaatgggtcgagaatgggcagttatacctcttccagctgtacaacaaagattatgcagagggtgcccacgggcggaaaaacttacacacgctctattgggaatctcttttcactgcagagaaccttagtgatattgtgattaaactggggagcaatgccgagttattttaccggccccaggcaataaaaaaaccggttaagcacgaagtcggcacaaaaatgctgaaccgtcgcgacaaatcaggaatgccgatccctgatgcaatatatttgtcactttatcagttttataacggtaagaaagaggaagcggaacttacagatgaggaacgtgcctatatttctcaggtaattgttaaagatgtccaacacgagataattaaagaccgccgttacaccaaacagtttcattatcagttccatgtgcctatcgtttttaatgcgaatgcaaatgggaaagtcaagttcaatgataaagttatggattatattcaagacaatcctgatgttaatatcattggtattgatcgcggagaaagacatctgatatatttaacgttaattaatcagcgaggagagatcctgaaacagaaaacctttaatgtagttggcaactataactatcaagagaaacttaaacaacgagaaaaagagcgtaaaaatgcacagaaatcatggcaggacatagagcgtattaaagatctgaaagagggcttcttatcggctgtagttcatgaaatcgcccaaatgatgattgaatataacgcgattgttgtattggaagacctgaatcgtggctttaaacgtggtcgttttaaagtggagcgacaagtctatcaaaaattcgaaaaaatgttgattgacaaactgaattatctgagtttcaaggatcgcgagattgcaaacgagggtggaattctgcggggataccagctgacagaaatgactctgaactactctgatataggccgtcagaccgggttcctgttctacatcccggcagcatatacgtccaaaatcgatcctgtaacaggatttgtaaatcactttaatcttaatgatatcacaaatgcagaaaaacgcaaagcatttctgatgaaaatggaaagaatggaaatgaaaaatggaaatgtggaattcgaatttgattaccgcaagtttaagacattccaaactgattaccaaaatgtttggacagtaaacacttccgggaaacgcatcatttttgacactgagacccgcaaagcgaaagatgtatatccgacaaaagaaatcgttcaagcatttgcgaatagaggtattgtgttggaggaaggcatggatctgaaagcaattattgccgaggttgagccggatagtaagaatgccgcttttttccgctccctgttttatgcctttgaaaatacattgcggatgagaaattcaaatgccgagacacaggaggattatattttgagtccagtcgcgattagcggtaaacaattttgcaccactgatgaagccaacaaaggtaaagatgccaatggtaattggctgtcgaaattgccggttgacgccgacgccaatggtgcatatcacattgcgctgaaagggctttatctgctgaacaatcctcaaacaaaaaaaattgagaatgaaaaatggtttcagtttatgattgagaaaccgtatatagaaaaacgtccggcagcgactaagaaggcggggcaagctaagaagaaaaaggggtcgggtcctgctgccaagagggtcaagttggacggcagtggtcatcaccatcatcatcattaa

SEQ ID NO: 705 - DNA, 3846 bp, synthetic construct
  misc_feature 1..3846: note = Sequence codon optimized for E. coli expression
  source 1..3846: mol_type = other DNA
atgaaaacgttcaatgacctgaccgggctgtatagtctgtcgaagaccctgcgatttgaactgaaaccagttggcaaaaccaaagataatattgaaaccaaagggattatcgcgcaagacgaaaagcgcgcagaagaatacaaaaaggtcaaagacatcattgaccgttatcataaatcgttcatagacatgtgcctggctggactggtccttcgtaccacgagcgacgggaacaacgacagccttgaagattatgtcgcactggcgtccaaaagtaatcgtgacgagaaggaagagaaagattttgacgacgtgaaaacagcgttacgaaaacagattgttgatgcatttaagaaaggcaatagctattccgacctgtttaaaaaggagttaattttaaaccatctgcctgactttgttaccgatgaacaggaaaagcaaatggtagagaatttctcgaaatttaccacttattttacgggttttaatgaaaaccgcaaaaatatgtactcagacgaagagaaatccaccgcgatagcttatcgtctgatacatgaaaatcttccaatgtttatagacaacattaaatcttttgcgcgcattactgaacaagaggacattgatttcattgccgatatcgaacatagctttcgcgaagagttaaaaggacagtccataaccaaaatgtttagccttgaaaattttaccaatacgctgacgcagggtcaaatagaactttacaacaagattgtggggggacgagtggaagattctggcgcaaaaaaacaaggaatcaacgaacacgtaaacctgtataaccaaaaacataaagacgctcgcctgccgcttctgaaacctctgtataaaatgatcctgtcagaccgcgttgtactttcttggttacctgaagagtttgccacggacgaagagatgttagacgcaataaatgaaacacataacaacttaaaagatgttctggtcgatgttcgcgagcttctgcagaatatagacaactatgacacagagcatatttatatagcaaacgataaaggattgtctgatatctctcaacagatctttggccagtacgatgtttacactagcgcaatcaaggccgaactgagagatagcatcaccccaagtgctaaggagcgcaaagacccagaactgttagacaaaagaattaataacatttttaaagcatccaagtcttttagcatcgattatctgaactcccatgtagaactcgggaagactattcagtcttattatgctcaactgggagcttatgatcggaatggtgagcagcgtattaacctgctttcacagatcgacctggctcacgtggatgctcttgaagtcctgtccggcaaacatacaaatttgaatcagtcagaagaatcgataaaaaaaattaaagcgctgctcgacgcgtataaagcgctgcaacattttatcaaaccactgcttggtaatggagacgaagctgataaagacaatgaattcgatgctaagttacgcgcaatatggaatgagctggatataataacgcccctttacgacaaagttcgaaatcgcctgacgcggaaaccgtattcaaccgaaaaaatcaagctgaatttcgacaatgcacaattgcttaatggatgggatatgaataaagaacctgattgcacgtcagtcctgctcagaaaagacggtcagtactaccttgcaataatggataaaaaaagtaatcacgcatttgatactgatgatttgccttgtgatggcgagtgttatgagaaaatggagtataaacagatggctctcccaatgggcatgggggcatttgtaagaaagtgctttggtacggccaaagctctgggttggcagtgcccacggcacctgatgacctcggatggtaaaatcatcataaaagatgaagaagctcaaaaggtcttgccggagctgatcgactgttacaagtcttttctggacatttacgaaaaagatggcttcaagtataaaaccttttcttttaaatttaaaccgtcaagcgagtatgagaagttatcacactttttcgccgaagtgccttcacaaggctacaaatgtagcttccgcaatgtgagcgtcagctttattaatcaacttgtagacgaaggaaaactgtacctgtttcagatctggaataaggatttttctgagtacagcaaagggacacctaatatgcatacgttatattggaaaatgctttttgatgaacgtaatttagctaatgtcgtctataagctcaatggccaggctgaggtcttctacagaaaacgtagccttgacttagacaaaaccaccatccaccgcgctaaccagcctattgcgaataaaaatatgcagaacgaaaaacgtgaatcaactttctgctacgatatcgttaaaaaccgccgctatactgtggataaatttcagtttcatgtacccatcactataaattttaaagccacgggaggcgataatgtcaacgcgtcagtgctcgacgtcatccgtaataatggtatcgaacatatcattggaattgatcgaggcgaacgtcacctcctgtatttatccctgatagatatgaagggcaatattgtcaaacagatgaccttaaacgatataatcaacgagtacaaaggcaatacctatacgaataattataaagaattactgcaagcgcgtgaaggtgatcgcaaggaggctagacagaattggcagaagatcgaaaatattaaggagttgaaggaaggatacctgagccaggttgttcacgtaattactaaaatgatggttgagtacaaggcgattgtcgtgttagaggatttaaacgggggctttatgcgtggccgacagaaaatagagcgccaggtttatgagaaatttgagaagatgctgatagataaactcaactactatgtggataaacaaaaagatgccaatgaaaatgggggtttgttgcacgcctaccagcttgcttccaaatttgacactttcaaaaaacttgggaaacaatcagggtgtctcttttacattccggcttggaacacctcaaaaatagatcctgttaccggctttgtcaatatgttagatacccgctatgagaacgcggataaagccagaaactttttctctaaatttaaaagcatttcatataatgcagataagaattggtttgagttcgtaattggtgattatagcaagttcacggataaagcgaaggatactcgcacggattgggttctgtgcacatatggtacccggataaagacgttccgcaatccggaaaaactgaatcaatgggacaacaaggagattgtgttgactaatgagtttaaaaaagtgttcatggaagcaggcattgatattaacggcaacttaaaggaggcaatatgcaccctgaccgaaaagaaacatctggaatcattaatgcagctgatgaaacttctggtgcagatgagaaatagcgagaccaacagtgaggtagattatttgctcagtcctgtagccgacactgagggacacttttacgattctcgtaattgtggagataatctgcctaaagatgcggacgctaacggggcatacaatattgcgcgtaaaggattatgggccgtgatgaaaatcaaggctagtaagccgcaagagaaccttaagctgggtatctctaacaaagaatggctgcagttcgctcaagaaaaaccttacctgaacgacaaacgtccggcagcgactaagaaggcggggcaagctaagaagaaaaaggggtcgggtcctgctgccaagagggtcaagttggacggcagtggtcatcaccatcatcatcattaa

SEQ ID NO: 706 - DNA, 4098 bp, synthetic construct
  misc_feature 1..4098: note = Sequence codon optimized for E. coli expression
  source 1..4098: mol_type = other DNA
atgaaaactattgacaaattttgtggtcaggcaaatggctatagcagaagtatcaccctccggaaccgcttgatcccgattggtaagacagaagaaaatattcagaaccagaacttactggataacgatataattcgtagccgggcgtatgtcgaagttaaaaagatgatcgatgactttcaccgtagtttcattgaagacgtacttagcaaaatcgaacttaagtgggatgatctctatcaccagttcgacctcttccagaatgagaaagataagcagaaaaaaacaataattaaaaaagaaatggagacgtgtcagggcgagatgcgtaagcagatagtgaagaaatttaaagatgatgaccgttttgataaactgtttaaaaaagatctgctgaccgaattcgtccccaccgttatcaaaaatgatgaactgggcacgatcagcgataaacagacggcccttaatgtctttaagggatttgccacatattttaccgggtttcatcagaaccgtcagaatatgtacagtgaaaaagcacaatcgaccgcgataagtaatcgtattgtgaatgagaattttcctaaattctatagtaatgttaaagtatttgagtatttacaggataattttccagagatcattagccagacagaacagtcgttgagtgtgctgctgaaaggaaaacgtttagctgacatctttacagaggatggctttaacgcggtgctgtcacaacgaggtatcgacttctataatacaattataggcggagtcgcaggagaggcaggcacccagaaattacaaggacttaatgaagaaataaacttggcaagacaacagctgcccatcgaagaaaaatataaactgaaatgtaaaatgtcggtgttatacaaacagatccttagtgatcgcagtactacgtcctttataccggctggttttgaaagcagcaacgaagtgtatgaatcaattaagcaatttaaagaattatccctgaacaccattatttcagaagcaaaaactctttttgaaaagtccgattacaaccttgaacatatctacgtcaccgctaagggtgtcacggaatttagtctgaaattatttggaaactggagtattctccatgatggacttttcctgatcgaaaaagatggtgctaaaaaaagcctgtcggagaaacagatcgagaccctgcgtagagaaattgcaaagcgcgactactcattatcggagctgcagaatgcttacgaaatgtgggcaaaagaaaatgatgttgctgtcgaaaagacagtcaaaaactattttaaaatagcggagctgcgcgcaaacgaaaaaacgaaggagaaatgctttgttgaaatcctcaaaaagattgaatcggcatttgagaaaatcgacttcgaaaaacaggaaaacctgattaaagaaaaggagagcgccacacctattaaagacttcctcgatgaagtacagaacttataccattacctcaagttagttgattatcgtggtgaagaacaaaaagatactgacttctattctaagtacgatgaaattttacaaactctgtccgagatagcgcccctgtataataaagtacgcaattttgtaacaaaaaagccgaacgaaatacgtaaaatcaaagtgatgtttgacagcagctctttcctgaatggttggggtacagagtacggtactaaggaggcacatatctttattgattctggtaaatactatttgggcattgttaataaaaaacttgataaaaaagatgtagaaagccttaaagcggatggtgaacatatggtgtcaaaggtgatctatgatttccagaagcccgacaataaaaatacgccgcgcctttttatacgaagcaaaggtgagtcgtttgccccggccgtttccaaatacaacctgcccataaccgatattattgacgtgtatgataaagggctgttcaagacagaatatcgaaaaatcaatccggaagaatacaagaaagcactggaaaagctgatagattactttaagcttggcttttctcgccatgactcatataaacactacaactttagttggaagaaaaccagcgactacgcagatatagccgacttttatactgacaccatcaaatcgtgttaccaactgaagttcgaaaaagtaaactttgattgccttcttaatttatccaattctggtaaactgtttctgttccaaatttataacaaagactatagcaccggcaaggacggtggtaatggctcaactggaaagaaaaacttacacactttatattgggaaaatctgttttcagaagaaaatcttcgaaatgtgtgtctgatgttaaatgggaaagccgagttgttttggcgtgatgcaaatccaaatgttaaggccgtttgtcacaagaaaggatccatactgattaatcgcacaactagtgatggagaaacaatacccgaagaaacataccaggagatatataagtataagaacccggataaacaggagaaagatttcaaattgtcagatgcggctaaagagctgttagatagcggcaaggtagtgttcaaagatgcaaaatttgatatcatcaaggatcatcattttacccagaaaacgtacttattccattgtccaattaccatgaactttaaggcccctgaaataaaaagaaagtttaatgaaaacgtgcaacaagtgcttaaaaataatccagatattaaaattatcgggctggatcgaggtgagcgtcatttgatatacttaagcctgatcaatcagaaaggcgagattgagcttcagaaaacgctgaatctcgttgagcaggttagaaatgataagaccgttagcgttaattatcaagagaagcttgtgcaaaaggagggcgagcgtgataaggttagaaaaaactggcaaattattagcaatattaaagaactgaaagagggatacctgagtaatattgtccacgaaattgccaaattaatggttgataataatgcgatcgtcgttatggaagatttgaatctggggttcaagcggggccgatttgctgtggagcggcaagtgtatcaaaagtttgaaaatatgctgatagagaaactgaactatcttgtgtttaaagacaaagaaaacacagagccgggaggagtacttaacgcctatcaattgactgataaaactgccaatgtgtcggatattggtaagcagtgcggttggatcttttacattccggcggcttacacatcgaaaatagatccgaaaactggttttgccaacctgttttataccgccggcattaacaacattgaaaagaaaaaggcttttttcgataagtttgactcaattcgttatgatcgtaaaactgattcttttatcttttcgtttgactatagcaagttcggggataatacggacttttacaaaaaatgggaagtgtattccaagggtgaacgctttgtttttgataaaccggatcactggaaatcatataaaaaaattgaaactagcagtaagaagtctgaaaaagcggtaatttgcgtgaaccctactgaggagctcaaagtgctgtttgataaacaggatatcaactggaactctgaaaaaaattttatcgatttaattcacaccgttcagggtaaacgagaaaattgtgtgttctacgacggcttatatcgaagttttacggcaatcctgcaaatgagaaactctaatgctaaaaccggcgaggactacattatttctccagtgatggcagacgatggcaccttttttgactctagagaagagttcaaaaagggagaagggagcaaattgcccgtcgatgctgacgctaatggtgcttatcacatagctcttaaaggtctgtctcttctcaaacgctttgatgttgccagcgaggctgaattgaaaaagtttgatatgaaaataagtaacgccgattggtttaagtttgcgcaggagaaatcttatgcaaaaaaacgtccggcagcgactaagaaggcggggcaagctaagaagaaaaaggggtcgggtcctgctgccaagagggtcaagttggacggcagtggtcatcaccatcatcatcattaa

SEQ ID NO: 707 - DNA, 3786 bp, synthetic construct
  misc_feature 1..3786: note = Sequence codon optimized for E. coli expression
  source 1..3786: mol_type = other DNA
atgaaaaagattgataactttgttggttgttacccggtttctaagaccctccgcttcaaagcaattcctataggcaagacgcaagagaatatcgagaaaaaacggctcgttgaagaggatgaagtgcgtgcaaaggattataaagccgtgaaaaaattaatcgaccggtaccacagagaattcatcgaaggcgttctggataatgttaagctggatggattagaagaatattatatgctctttaacaaatcagatcgagaagagtcggataataaaaagatcgagattatggaggagcgcttccgcagagtaatctctaaaagttttaaaaataatgaggagtacaagaaaatattctccaagaaaatcatagaggagatacttccgaactacatcaaagacgaagaggagaaagaattggtcaagggatttaagggcttttataccgctttcgtcggctatgcccagaatcgtgagaatatgtactcggacgaaaagaagtcaactgccatctcatatcgcattgtcaatgaaaacatgccacggttcataaccaatattaaggtcttcgagaaagcaaaatctattttagacgtagataaaattaatgagataaacgaatacattttaaataacgattattacgtcgatgatttttttaatattgatttctttaattacgtacttaatcagaagggaattgatatctataacgccataataggaggaatagttacaggcgacggacgcaagatccagggtcttaatgaatgtatcaacctgtataatcaggagaataagaaaatacgtttgccgcagtttaaacctctgtacaagcaaatcctgtctgaaagcgaatccatgagtttctatattgatgagatcgaaagtgatgacatgctgattgatatgttaaaggagagtctgcagattgatagtactattaataatgcaatagatgatttaaaagttctgtttaacaatatctttgattatgacttgtctgggatttttatcaacaacggattaccaataacaactatttctaatgatgtgtatgggcagtggtctacaattagtgatggttggaatgaacgttacgatgttctgtcaaatgccaaagataaagaaagtgaaaaatatttcgaaaaacggagaaaagagtataagaaagtgaaatcgttctcgatcagcgatctgcaggagctggggggtaaagatcttagcatttgcaaaaaaataaatgaaataatatctgaaatgatcgatgactataaatccaagattgaagagatccaatatctctttgacatcaaggagttagagaaaccactcgtgacagatctcaacaagattgaattaataaaaaattctcttgacggactgaaacggattgagcgctatgtaattcctttcttaggcactggaaaagagcaaaaccgcgacgaggtgttttacggctatttcatcaaatgcatcgacgccattaaagagatcgatggtgtatacaataaaactcgtaattacttaactaaaaaaccttattccaaggacaagttcaaattgtattttgagaacccacagctgatggggggttgggaccgcaacaaggaaagcgactatcgttccacattactgcgtaaaaatggtaagtattatgtcgccattattgacaagtctagcagtaattgcatgatgaatatcgaggaagatgaaaatgacaattatgaaaaaattaactataaactgctgccaggtccgaacaaaatgctgcctaaagtgttcttttccaagaaaaatcgtgaatattttgcgccgtcgaaagaaatagaacgcatttactctacaggtacgtttaaaaaagatacaaacttcgttaaaaaagattgcgaaaatctgataacattttataaagactcgttagaccgtcatgaagattggagcaagtcttttgattttagctttaaagaatcgtcagcctatcgggacatttcggaattttatcgcgatgtagagaagcaggggtatcgggtatcattcgacctgttaagctcaaacgccgtaaatacactggtcgaagaaggcaagctgtatttatttcaactgtataataaagacttctctgaaaaaagccatgggattcccaatctgcatacgatgtatttccgcagtctcttcgatgataacaataagggtaatattcgcctgaatggcggagcagagatgttcatgcgacgtgcgtccctgaacaaacaggacgtaaccgtccataaggcgaatcagccgatcaagaacaaaaatctgcttaatccaaaaaagaccacaacacttccgtacgacgtatataaggataaacgtttcactgaagaccaatacgaagtgcatattccgattactatgaataaagtccctaacaatccgtataagatcaatcacatggttcgtgaacaattagtcaaagacgacaatccctatgtaatcggcatcgaccgaggtgaacgtaatcttatttatgtagttgtagtggacggccagggtcacattgttgaacagttaagcctcaatgaaattattaacgagaataatgggatttcgattcggacggattatcatacgttgttagatgctaaagaacgtgaacgtgatgagtctagaaaacagtggaaacaaattgaaaacataaaggaattaaaagagggttatatttctcaagttgtccataaaatctgtgaactggtggagaagtacgatgcagtgattgcgctggaggatctgaacagtggttttaaaaattcccgggtaaaagtggagaagcaggtatatcagaaatttgaaaaaatgttgataacaaaactgaactatatggtagataagaagaaagattataacaaaccgggtggtgtattaaacggttatcaactcactacccagtttgagagcttctcaaaaatggggacacaaaacggcataatgttctacatacctgcatggttgacctctaagatggatcctactaccggcttcgtcgatctgttaaaacccaaatataagaacaaagccgatgcacagaaatttttttctcagttcgattcgatcagatacgacaaccaagaagacgcatttgtattcaaagtgaattatacgaaatttccccgaacagatgccgattataataaggagtgggaaatctacactaatggcgaacgcattagagtgtttcggaacccgaaaaaaaacaatgaatacgactatgaaactgtcaacgtatcagagcgcatgaaagaactgttcgactcctatgatttgttatatgataaaggtgaactgaaagaaactatctgtgaaatggaggagagcaaattttttgaggagctgatcaagctctttcgtctgacacttcagatgcgcaatagtatcagtggccgtacggatgtagattatttgatatccccagttaagaattctaacgggtacttttataattctaacgattacaaaaaggaaggcgcaaaatacccgaaagacgccgatgccaatggcgcatacaacattgctagaaaagtgctgtgggctattgaacaatttaaaatggcagatgaagataaactggacaaaacgaaaatttccattaagaaccaggaatggcttgaatatgcccagacccattgtgagaaacgtccggcagcgactaagaaggcggggcaagctaagaagaaaaaggggtcgggtcctgctgccaagagggtcaagttggacggcagtggtcatcaccatcatcatcattaa

SEQ ID NO: 708 - DNA, 4116 bp, synthetic construct
  misc_feature 1..4116: note = Sequence codon optimized for E. coli expression
  source 1..4116: mol_type = other DNA
atggaacactctctccgtgatttcaccggtctttactccctttctgaaacgctgtcttttgaattacgacctttagactcggaatttaatcctaagcctgctgaccgagccttagccgacatgaagaaatatttggacgaggatcgcaaacgcgctgctcaatatgctagcataaaagctatactcgacgaagaacacaaaaagctgattgaacgcgtgttatctgacgtgcctggtgccattggccgcttaaaaaaccgtaaagcattcgcagaaattctctcggacgatggtagcggcattcgctggtctcgactgaaagaagcggaaggggcggcacgcaatgccaaaaccgagatacgtgaagccaaaaagactcgcaaagccaccagtgaagcggatggagccattacaacggaaacgaaggaagaggcccgtttcaaagatctgcagaaaaaattccgtgagctgatcgccgccctgttagacacagatgaaaaaaagaaatctctgttggaggcgacgcctagcaagtatattaaaggtatgcttagcgagtttggggatgcgttacagccggatactcgtgaagccttaaacaccttcgaaaaattcgcttgttacttaaagggttttcaagaaaaccgtgcgaatctgtatgctgctgagccgcaagtgactgcggttgccaaccgcgttgtgaaccagaattttccgaaatttctgacagcctgccgcattatggcgcatattcaagaacgttatccagagattatttctgaagcggaacgaaaccttgcagctaaccttaatggggccccgttgatgtcacgctttcagccggatgcatttgatctgtgccttgcgcagtcgggcatagatgtgtacaacacaatacttgggggttttaccttaaaagatggcaccaagattcaaggtatcaatgagactatcaatttatatagacagcaacatgccgatgcagcgaacgatagaaatctcgctcccattccggcgctttataagcagatcctttcagatcgcgatacgctcagtttcataccggagatgtttgattccgatcgagctgtttgtgattcaattctgaaattcttggaatctctgaaatgggaaactatgcaaagtgatattacatcactgctggattccttagatgcggatgaccctggcgtttttgtcgaaaaaagcgagttgacacgtatatcccataaactcttcggtgattggtcgcgcattcgtgcagccctggaacggtgtgcagaaacaaaattcactcgtaaagcggatcgcgaaaaatggttgaacaaagatatatactcgcttcgtgagcttaacgaattagattttaaattatcagaagaagatgatattgcagaagtgcctgccattacagacttttggcggggggcccatcgcgccgaagtgtttagtgctgtcgagtcggccattcaggcagttttagatacgcttcacagcgaggcttatccagaaggtgatactgaaccgcgcctgcgtgaaaacgagaatgatgtcgctgcaattaaggatctgctggatgcacttaccggcttgcttcacctgctgaaacctctgcaggcggaatcaccggacgccaatatggtattctatgccgattttaatgatttttacgcacgcttagacccggtaatacccttgtacaatcgtgtccgtaattacataacccaaaaaccaagtgaacagaagaaggttaaactgatgtttaattgctcaaccttggctgatggatgggatcgtaataaagaaagtgataataacgccgtaatcctgttaaaagacgggaactattacctggcagttatccagccagcgcaaaaacagaccgacggcaaacgtgagcgcaaagtgaaattcgccgatttcgaaacagacggcgccgggccttgttttcgtaagatggtatataaatatttaccggggccaaataaaatgctgccgaaagtcatcttttcaaaatctaatcgtgatatttttgatccaccagcagaattattaagaaaatatgaggccggcatgcataaaaagacttccccgaatttcgatctgaaattttgccgcgaattgatcgatttctttaaagtttgtatcgcgaagcatgaggattggtcaaaatttggttttcagttcgcggatactgcaaaatataacggtattgacgaattttacaacgagatcagcgcccagggatacaaaatgacttttgcccccattccagtgcaaaccgtttccgatctgatccgagacaacaaaattctgttgttccagatatacaataaagatttcgccccagggtccacaggtcgccaaaataaatttaccctgtactggaaaaccctgtttgaggaggagaatctgaaagatgtagtcttcaaattaaacggcgaagctgaattgtttcttcgcgatccttcggtgcggaaaccttttgttcatagaaaaggtgataagcttgttaatagaacaacaaaagacggtgctccggtttcagaatcggtgcatgcagaactttgtaagtttgccaatggccgcattggctatgatggtctcagtgcggaagctagagggatttgggacaatggccaagcggttgtgaaaaccgccacgcatgacattaccaaagaccggagatttacgacgccaaaattcctgttccacgtgcctataagtattaattttaaagccccggatgcgaaagcgggtataaatcagaaagtgctcgattatcttcgtgacaaccctggcgtgaaggtcatcgggattgatcgtggtgaacgcaatctggtctatctcagtttgataggccgcaacggtcggatacttttacagaaatcttttaatactgtaccgcaacgacgttccgaccgaacagtggaatttgattaccacgccaaacttgaccagcgcgagaaagagcgggacgccgcgagaaaaaattggacctctgttaatcgcataaaggatctgaaagccggatatttaagccagattgtgcatgagatcgccaaacttatggtggaacataatgcagtagtcgtgatggaggatctcaactttggtttcaaaagagggcgcttcgcaatagagaaacaggtctaccagaacttcgaacgcgcgcttataaccaagctgaattatctggtgtttaaagacgctgaaacgcctgcggacgcagggtatgttctgaagggtttacagttagccaataaattcgaatcgtttgaaaagttagggaaacagagcggctttttgttttatgttcctgccggttatacaagcaaaatcgacccagcaactggattcgtgagcttgtttcaatttggcaagtatacaagtgctgaagcgcgcaaggcctttttgggcaaattccgttcgattcgttttgatgccgcgagagatgcgtttgccttcactttcgattaccgcgatttcccggcccaaggaaaagagttaccggggaagtctgaatggactgtccgctcagttggcgaacgtatcgtgtacagtccaaaaaaacgtgagtcattcgtgtgcaaaccaaccgagattattctcgatgcgctggcgaaacgcggtatccggccggaagatggctttgatctgctgcgattaattagagagaccgacggcgcggatcgtgccaatgcagcgttttttaacgccgtgttcgaggcatttaaactgactgtgcagatgcgcaactctgacgcaaagattggtgaagattatatccttagtcccgttatgagcgcggatgggacgttttttgatagtcgcaaagccccagcagacatgccacgagacgccgacgcgaacggggcctatcatattgcgatgaagggactttatctgttgcaaaatcggttcacagccggtaccaagaaagccgatctgaaaatatcgaaccaggattggtttgattttattcaaaatcggcatgcccgcaaacgtccggcagcgactaagaaggcggggcaagctaagaagaaaaaggggtcgggtcctgctgccaagagggtcaagttggacggcagtggtcatcaccatcatcatcattaa

SEQ ID NO: 709 - DNA, 3852 bp, synthetic construct
  misc_feature 1..3852: note = Sequence codon optimized for E. coli expression
  source 1..3852: mol_type = other DNA
atgaagcagttcaccaatctctatcctgtgtcgaagactttacgtttcgaacttcaaccggtcggaaaaactaaagagaatatcgagaaaaatgggattctgctgagagatgaacaacgagctgaggactataaacgggttaaattattgattgatgagtaccacaaacagttcataaaacaacgcctttggaattttaagctgccaatgattaacaacggtcaccacgactctcttgaagaataccaggctctgtatgaactttctaaaagagatgatgatcaagaggcaacgtttactgaggttaaagacaatcttcggtctatcattgctaaacaactgacggtgggttccacctatgaacgtatctttaaaaaggagttggtacgcgaagatctgatagaattccttgaagacgagaaagacaaagaaatcgtccgtcagttcgcagactttacgacctatttttctggtttccacgagaaccgcaaaaacatgtattctgctgaagagaaaagcaccgcgatcgcgtatcgccttatccatcagaatctgccgaaattcatggacaacatgaaagcttttgccaagatcaaacagacatcagtcgcagagcattttacagatatctatgaagggtggaaggaatatctgaatgtggaatctctggaagaaatttttagcctggattacttttcagaaactttaacccagccgcacattgaggtttacaattacatcattggaaagaagattctggacgatggtactgaaataaagggtataaatgaatatgtaaacctgtacaatcagcaacaaaaagacaaaagtcagcgccttccctttctggttcctttgtataaacaaattttatcagatcgcgagaaattatcgtggttaagcgaagaatttgattctgatgagaaaatgttggcggcaataaaagagtcttataatcagctgcatgacttactgatgggtgaagaaaatgaatctctgcgttccctgcttagccacataaaagactacgacctgactcagataaacatcaccaatgatttatcactgacagagataagccaacatctgttcggccattacgacgtttttagtaatggcatcaaggatcagctccgtattattaccccgcgcaaaaaaaaagaatctgatgaaaattttgaggatcgaattagtaaaatttttaaaacccagaagtcttttagtatcgattttctggacaaattgccccagccaatcatggaagatggaaagccacggtgcatcgaagactacttcatggctctcggtgccatcaacacgaacacgacgcagaaggaaaatttgtttgcacagattgaaaatgcttacgaagatgcaagagcaattctgcagatgaaagagacgggggacacactgtcgcagaacaaatcagcggtggcgaaaatcaaagcgttgttagacacactgaaagatttgcagcattttattaaaccgctgcttggctcgggtgaagagcaggagaaagacgaacttttttatggctcctttcagatgatgtgggatgaactggacgcaatcacgccgctgtataataaagttcgaaattggctgactcgaaaaccatttagcacagagaaaataaaattgaacttcgataatgcccaactcttagcgggctgggatctgaacaaagaaattgacaatacctgtacaatactccgcaaagatggactctatttcttggccattattaacaaacagcacaatcgcgtactgaccacagataacttaattagcgatggggattgttatgaaaaaatggtgtataaacagctgggacagatttcgcagcaactcccgcgaattgcattcagcaatagttggcagcagaaaatcaccataccggccgacgtaatgcgcattaaaaaaacaggcagttttaagacgaacaacgatgacttgcagaagcttattgcattttataaatattttatatcgcagcacaaagaatggaatagctttttcaatattcgttttactgaaagagataattataaaaacctgccagatttctatagtgaagtggatacattgttttacagtctgtctttcttaaaagtttcagttgattatattaatcaacttgtggatgaaggcaagctgtatttgtttcgtatttggaataaagatttctctgaatttagcaaaggtactccgaatctgcatacattatattggaagatgttgtttgatgaacgcaacctggcagacgtggtgtataaactgaatggccaggccgaggtgttttatcgtaaagtaagcattaagccggaaaatcgtattgtgcatcaggcacaccgcccaatcaccaacaagaacgaattgaacgaaaaacgcacgtcaacattcgaatacgatattatcaaagacagacggtacactgtagataaatttcagttccatgtaccgatcacgataaattttaaagcaaaaggccagaataacattaacccgatagtgcaggagacaattagacaagatggttttaaacacataattggcattgaccgcggagaacgccatttattatacctgagtttaattgatctgaatgggaacatagttaaacaaatgacactgaacgatatcataaacgaatacaaagggcagacgtataaaacgaattatcatcatctcttagctaagagagagggagaacgtactgacgcgcggcgctcatgggataccatcgaaacaatcaaggaactgaaagaagggtacctgtctcaagtgattcatataataagtaagatgatggtagaatattctgcaatagtagtgctggaagatttgaatattgggtttatgagaggtcgccagaaaattgaacgccaagtgtatgaaaaatttgagaaaatgctgatagataaactgaattgctttattgacaaacagattgcgcctcaggaagttgggggcatgctccatcccatccagctcacgaataagtttgaaagtttcggcaaattaggtaagcagagtggttgcctgttctatattcctgcctggaatacaagcaaaatagacccagtcacaggatttgtgaacctgttcgatacccactatgaaacccgtgaaaaagctcgtttatttttttccaagttccagagaatcaacttcaatgaagaaaaaggttggttcgaattcgcttttgactataatgactttaccacgaaagcagaaggtacacgtacgcagtggacgttatgcacatatggggagcgcattcggacttttcgaaatccagataacaaccatcaatgggatgatgagcgtatcgaactcacagaggaatttaagcagttatttgaaaagtacgatatcaacatccgtggtaacctgaaggaggcgataagcaatcagagtgatgcccaattctaccgtgatcttttagggctcatgaaacttttgctccagatgcgtaattcaataacgaatagtgaggaagattacctgttgtccccggtagcggacgaaaatggtcactttttcgattcacgtgaagagattgaatctcttcctaacaatgccgatgccaatggtgcttataatattgctcgtaaagggctgtggattatggagcaaatcaaaaaaacggataatctcgccaagctgaaattgacgatatcgaataaagagtggctgcattttgcgcagaataaaccttacctgaatgagaaacgtccggcagcgactaagaaggcggggcaagctaagaagaaaaaggggtcgggtcctgctgccaagagggtcaagttggacggcagtggtcatcaccatcatcatcattaa

SEQ ID NO: 710 - DNA, 3939 bp, synthetic construct
  misc_feature 1..3939: note = Sequence codon optimized for E. coli expression
  source 1..3939: mol_type = other DNA
atgaaaaaggaaaacatattcgagaattttacccaccaatacagcctgtcgaaaaccctgcgatttgaacttatacctacagaggaaactaaacgtttccttgaaaaaaatgaaattatcaagaaagacgcggtaatcgacgaaagttatcataaagccaaaccgtatttcgattcccttcatcgggaatttattaaggaatcgttagaccctgagcgcagcctgctgtcatttggtaatttcgaacgctcctggaatgattttcagaaggacaagaaatcaaacaagaaaaatttgttggcccagaaaaaacttctgtataaggatatcgcgaaactgtttgacgattatgttaatacatggaagaaacagtatgcaccagaaactaagaactcaggtacgaagctgctgtattcagccgataccctgagtattcttaaaaagcggtttccaaaggattctgaaaatgaaaaattattcataaaggacgaacacgggaacgaccgctatatttttgattcttttgatcgctttacgacctatcttactaagtttcaggccacgcgggaaaacctgtataaaaacgatggcacgagcacggctgttgcaacgcgtatcgtggagaatctgtctttctttttggcaaataagagcaaattcgaaaaatttcttgcatataaagatattctcaaacttacagaccaagagaaagaaagtagtaagacagaatactacatgcgctgcatgacgcagcccggtattgagaagtacaatgctctggtgggcgatcttaatgcacgcatgaaaactcttcgcgacactgccggaaaagacgcaaaaaaatcggattacccgttgctgaaaaaactgtataatcaaatactggccgaaaaaaagattgaatccgataaagtcttcgacatcgaatcgaacgaagaagtcccggtgcggatgcatgaattttatgaggaagttgagcgcgtatctaccatcgccaaggaacttgttacgattctggcccagggcggtttcgaaaatgagtacggaggcatttacctccataatcgagctataaatactattgcgcgcaagtggttcgttagcgcttacgaattcgaaaattgcttgccgcagaaaggcaagaaaaaagaaggatcggttcgagtcgccccgtttgtctcctttgccgaaatcaaagatgctcttggtgaaaagctggcagaagatctgctgaaagaaaaactgttcgaggagaaagcttatcgcctcgtaaagcgtacgctggcatattcccagttccttgccctgtttgcgaaagatctggaaatcttacttaatgaatataatgagaaaaaaaataacttctctaagaaggaccttcgtatttttgagcgcggcgagaacgatgagaatgttgatgcgttgaaagatgccctcgatgctggcctgcatattgtacagtttatgaaatattttgtactgtcatctaaaaaagcagatgacaagccaactcacacgtcggccgaattctacaatcattatgacgagttatatggggatccggatcagaaacatgatattgttcgctattatgatgcgtttcgcaactttctgactaaaaagcctgcagatcagaaaaaaatcaaacttaattttgagaatggcgcgcttctgactggattcgacaaagacaaggagagtgagaaactgggtatcatactgcgtaaaaatagtatttactatcttggtattatcaacaaagagcataataaaattttcgacgataagaaacaccaggatgcgtttgacgtggttgatgccaccagctatgaaaaaatggaatataaattgtttcccgacccaaagcgtatggtgcctaaaatcgcttttgcgaagaaaaaccgcgaacgtttcgggtggacccaagaaattcaggatatcaaagacgagtacgcacggttccaagatgatcgaggtgatcgtagcaactggagtaaacaattcgataaaataaaacttactaaattgatcgcttattatcagcatgctctcgaccgtggtggttacaaaaatacgtttgattttcaatggaacaacccggttgactattcggggatcggagaattcaatgatcatttgacctctcaaaattataaaattggctttcgccaggtcagacagagatacatagatgacaaagtagcccagggtgaattgtacttgtttaaaattcacaataaagattttggagagaaatctaaagggacacaaaacacccacacgttatactttctgaatttattctctcagcacaatctgactcacatcaaattgcgtctggctgggaatgccgaagttttctatcgtaaatccagcacccagcgcaaagaggaacaaagaaagttcattcgaccgattgttaaaaataaacgttttaccgaagacaaatatttcttccatattccgattaaaatcggggcgagtgttaacagtattagtgagacgaaattcaatcgtaccctcaatgagaagctgcgccaatccgcctgcctgattatcggtattgatcgtggggaaaaacacctggcatattattcagttatcaatcagaagggtgagatcgtggatcaggcgagtctgaacaaaattaatgacgttgactactgcgagaaactgcgaacgcgcgaaaaagagcggctggaacagagaaagtcgtggaaagcgataagccagatcaaagatttaaaacggggttatatctctcaggtcatccacaagttatctgaactggtgatcaaacacaatgccatcatcgtttttgaagacttaaacatgcgttttaaagaagtccggggcggtattgaacggtctgcctaccagcaactggaaaaggcactgattgaaaaatttgggtacttagtttttaaagataaggatccgttggaagccggcggcgtattgaatggttatcaattgagcgccccttttgaatcctttgaaaaaatggggaaacaaaatggggtaattttttatacaaatccggaatacacctcaaccaccgatccagtgacaggttggcgtcaacatatttatatcaaatcagatgccacggacaacgaagccttgaaagtgtttaccgagaaaatcggtataggctggagtgacgacaaacaaagctataccttttcttatgatcaaaaggatttctgggaggattctccggcgcgtaaatgggtactgtacgcaaatgcacctcgtcttgagcgctatcgtaacgatgccggctattggaccacccgtgaaaccaattccaatgatttgttacgtgagttattcgaagtttgggattttgatcaaccggaaggcgatatcagtgagcagatagccatgatgtatgaagagggcaaattaaagggagaaaagatcatttctgaaaagtcgcagcggttctttaaagctctgagatacgcgctgaacttaacgcaacagattagaaatagcgattctatccgttacgtctatgagcgcgatgcacagggtgatattgttgaagattctcaaggtaaaatggtcgtaaaagaaataggtgaaaacgttgattttattgccagcccggttgttcctttctttactactccgaatccatataccaaggaaaatttatgcggacttgtgatcgaaaatggcgacgcaaacggtgcgtacaatattgctcgtaagggcatcatgatgctggaacgtattaaacagacccaggcaaatccggatctgtatatctccaaatccgattgggatgaatggcttatgaaggatataaaacagaaaaaacgtccggcagcgactaagaaggcggggcaagctaagaagaaaaaggggtcgggtcctgctgccaagagggtcaagttggacggcagtggtcatcaccatcatcatcattaa

SEQ ID NO: 711 - DNA, 3885 bp, synthetic construct
  misc_feature 1..3885: note = Sequence codon optimized for E. coli expression
  source 1..3885: mol_type = other DNA
atgaatgatctgaaaacttttattggcatttatccggtgagtaaaactttaagatttgaattacgccctatcgggaaaactcaggagtggatagaaaaaaataaggttttagagtcagacgaacagaaaagcgctgattatcccaaagtaaaggccttaattgatgaatatcataaggtgtgcatccacgaaagtctgaaagacgtaagtttcgattgggccccacttaaaaacgcactgggtgaatatcagaaagaaaaaagtgatgaaagtaagagcgtattagatcgcgaacagacgaatatgcgaaaaaaagttgctgctgcgataaagtcctttcaacactacgaacaactgaccgcacccaccccacagaaattaattgatgatgtttttccggggcgttatgaatccgaagctttaaaatcatttaaacgttttgcgatttattttagaggcttccaggaaaatcgcaacaatatttacagcgcggacgctattagcaccggagtgccatatcgtctggtacatgaaaatttcccaaaattcataaccaatattgaagtatacaacaacatcaaggcaaattgcccggaagttattgaacaggtcgaaaccgaactgcagccattcttgaaagaaattcgcatcgaaagcattttcaacttagattattataactccttactgacccaggacgggatagatttttataatcaagtactgggcggagttgcagaagaagggaaacagaagtaccgcggcattaacgaattctctaatttatatcgtcaacagcatccagagatggcgggtaaaaaaaaagcattaaccatgattccattattcaaacagattctgtccgatcgcgaaaccctgagctatatcccacagcaaattgaatctgaaagacagctggtaagtatgttgaagcagtttcacagccacatactgaattatgaatataacggtaattcggtgaacgtcttacgtgctttgagtagaatgatttcgaaagtcgacgaatacaatccggagggaatatatatcgccgctaaagctttaaccgacatatcacaagttctctatggtaaatggtctgtactgtcagacaaactgtacgattcggcagtcaaaaaatatggcgaacccagcaccgcgaaaaataaaaaaaaaatagacgcatacgtttcgaaagaagcttattcgctgtccgaagttgggctgatcggtgacgttggcttatctagctatttttcctcagtttcgcaatccattgaacaggtagatgaaaaatgggctcgctttattcgatggtgcgataatgacgaagagcagctgttcctgaataatcccgaaggcacagagctggtacgtgcccttctcgactcatatatggacatattacaccggtgtggtgtcctggttgtttcggtggaaaacgatctggataaagatttttataacgatttttttccgatctatgccgagttggaaaacgttataattatttataatcgcgtacggaattacctcaccatgaagccttacgacaccaaacaattcaagctgaattttggtgtcccgaccttgggggatggctgggaccagaataaagaaaaggataacaaaactatccttctgttcaagggcggactgtcatatttggggataatgaacccctacaacacacctaagattaaggaatgcaaagtcgatagcgaggatacatattctaaaatggtatataaactgctgccggggccaaataagatgttgccaaaagtatttttctcaaaaaaaggccttcagtcattttctccttcagaacatattcaggaaatttaccgtaacggaagttttaaaaaaggaagcccggattttaaccacgaacgtttacatgaacttattgatttttacaaagactctatttcaaaacacccagactggtccaaattcgactttaagttctcaccaaccaaaagctacgaagacataagtgccttttatgacgaaattagcaagcaggggtataaaatacaatttattaatatttcagagcagcaggtcaatgagtgggttgctaatggtcagctctatttatttcagttatataataaagattatgcagaaggtgcgcatggtcgtaagaatctgcacacattgtactgggaaaatttgtttacgccggagaaccttaataatctggttctgaaattgaatggccaggccgagctgttttacagacccagctcgatcaaaacacctgtgaagcatgtagtgggtagtaaaatgctgaacagacgcgacaaaagtggtatgccgattcccgaaactgtttataagagcttgtaccagtattttaatgggaaaaaattaaagtccgagctcactgcggatgagatagcgtatatcgaccagatagttgtgaaagacgtaactcacgaaatcattaaggaccgtagatatactaagcccgaatattttttccatgtcccgattacatttaatgctaatgctgagggcaacgaatacataaacgaaaaggtgcttgattacattaaagataaccctgacgttaacattatcggaattgatcgtggtgaacgccatttgatttatctgacgttaatcaatcaacgcggcgaaattctgaaacagaagacctttaaccttgtcggcaattacaattatcatgcgaagcttgaacagcgggagaaggagcgcgacgctgctcgcaaatcctggcagagtattgggaaaataaaagatcttaaagaagggttcttaagtgcagtaatccacgaaatcgccgtcatgatgatcgaaaacaacgccattgttgttcttgaggatttgaattcgggatttaaacgcggtcggtttaaggtcgagcgccaggtctaccaaaaatttgagaaaatgcttatcgataaactgaactatctgtctttcaaagactgtaaagccgatgaagtaggcggcattctgcgcgggtaccagttggcccagaagtttacttcgtttcagaaactgggtaaacagagcggattcttattctatatccctgcagcttatacgtctaagatagatccggttaccggtttcgttaatcattttaacttcaacgatgtgacgaacgcagaaaaacgaaaaagtttctttatgaatatgaatcgtatcgaaatgaagaacggtgatatcgaattcgagtttgattaccgtaaatttaaaacttaccaaagcgattatcgaaatgtgtggaccgttaatacctccggtaaaagaattgtgttcgacgcagaaaagcgtcaatctaaggactattacccgacaaaggaaatcgtcgcagcatttaaagataaagatataatcctgaaggacggtatgaatgttaaatcattgattgcaaatattgaggcgaacgcacggaatgcttcattcttcggatctttgttttatgcttttcaaaaaacgctccagatgcgcaacagcaacgctacaacggaagaagactatattctgtcccccgttgttcataacggtaaacaattctgcaccatagatgaagtcaataaaggtaagaatgcggagggtaactggatctcaaaactgcctgtcgatgctgatgctaacggagcctatcatatagcccttaaaggcctgtatttactgatgaacccgcaaacgaaaaaaatcgagaatgaaaagtggtttaagtttatggtggagaagccgtatatcgaactgaaaaacatcgacaactttgttaaacgtccggcagcgactaagaaggcggggcaagctaagaagaaaaaggggtcgggtcctgctgccaagagggtcaagttggacggcagtggtcatcaccatcatcatcattaa

SEQ ID NO: 712 - DNA, 3897 bp, synthetic construct
  misc_feature 1..3897: note = Sequence codon optimized for E. coli expression
  source 1..3897: mol_type = other DNA
atgaatacgtctttgttttcttcattcacccggcagtatcccgtcactaagactttgcgtttcgagctgaagccaatgggtgccacgttaggacacattcagcagaagggattcttgcataaagatgaggaacttgccaaaatttataaaaagattaaagaactgctggacgaatatcatcgtgcttttatcgcagatacccttggagatgcgcagctggtaggtttagacgatttttatgctgattatcaggcattgaaacaggatagtaagaacagtcatttgaaagataaactgacgaaaacacaggacaatctgcggaaacaaattaccaaaaatttcgagaaaactccccagcttaaagaacgttacaaacgtctttttacaaaagaactgttcaaagcaggtaaagataaaggtgatctggaaaagtggcttattaatcacgattctgagccgaataaagccgaaaaaatttcttggatccaccaattcgaaaattttacgacatattttcaggggttttatgaaaatcgaaaaaacatgtacagcgacgaggtcaagcacaccgcgatagcttaccgtttaattcatgaaaatttaccccgctttgttgacaacatccaagttctgtccaagataaaaagtgattatccagatttatatcatgaactcaatcatctggattcccgtacaatcgactttgcggatttcaaattcgatgatatgttacaaatggacttctaccatcacctgctgatacagtcaggtattaccgcatataatactttattaggtgggaaagtgcttgaaggtgggaaaaaattacagggaatcaatgaactgataaacctctacggtcagaaacataaaatcaagattgcaaagttgaaaccattgcacaagcaaatcttgtcagacggacaatcggtgtcttttctgccgaaaaaatttgataatgattatgaactctgtcagaccgtaaaccacttctacagagaatatgttgcaattttcgatgagctcgtagttttatttcagaaattctatgattatgataaagacaacatctatattaaccatcaacagttgaatcaacttagccatgaactctttgcggattttagactgttaagtcgagccctggatttttactattgtcagattatagatggggatttcaataataaaatcaataatgcgaaaagccagaatgccaaagaaaaattactgaaagagaaggaaagatacacaaaatcaaatcattccatcaacgaattacagaaggcaattaaccactatgcctctcatcacgaagacacggaagtaaaggtgataagcgactatttttccgcgaccaatattcgcaacatgattgacggtatccatcaccacttctctaccattaaaggttttttggagaaagataacaatcaaggtgaatcatacctgccgaaacagaaaaacagtaatgacgtcaagaaccttaaactgttcctggatggtgttctcagactcatccattttataaaacctttggccttaaaatcggatgacaccttagaaaaagaagaacatttctatggtgagtttatgccgctgtacgacaaactcgttatgtttacactgctgtacaacaaggtacgcgattacatcagccaaaaaccgtataatgatgaaaagataaagctgaattttggcaactctaccctcctcaatggctgggatgtcaataaagagaaagataattttggagtaattttatgcaaggagggactctattatttagcgatcctggataaatcacataaaaaggtgtttgataacgccccgaaagcgaccagtagtcacacttaccagaagatggtttataagctcctcccgggcccaaacaaaatgcttcctaaagtttttttcgcgaagagcaatatcggttactatcaaccttccgcacagctgctggaaaactatgagaaaggaactcataaaaaagggtcaaacttcagcctcacggactgtcaccatctcatagattttttcaaatctagtattgcgaaacaccccgagtggaaagaatttggctttagattcagcgacacgcatacatatcaggatttgtccgatttttacaaagaaatagaaccgcagtcctataaagttaaatttattgatatcgatgctgattatatagatgatctggtggaaaaagggcagctgtatttgtttcagttgtataataaggatttttctaaacaatcctacggcaagcctaatttacataccttatactttaagtctttgttctcggacgataacttaaagaatcccatttataagcttaatggtgaagccgaaattttttatcgccgtgccagcctttctgtttccgataccactatccatcaagcaggcgagatcctgactccgaaaaatccgaacaatacccacaatcgcacactgagttatgacgttattaagaataaacgttatacaaccgataaattctttctgcatatcccgataactatgaactttgggattgaaaatactggtttcaaagcgtttaatcaccaagttaacacaacgttgaaaaatgctgataaaaaagacgtgcatattattggtattgatcgcggagaacgccacctgctctacgtaagtgtcatagacggtgatgggcgcatcgttgaacaacgcactttaaatgatattgtaagtattagcaataatggcatgagcatgtctacaccgtaccatcagatcctcgataatcgtgagaaagaaagactggcggcgcgtaccgattggggtgatatcaaaaatattaaggaacttaaggctggttatttgagccatgtggttcatgaggttgttcagatgatgttgaaatataacgctatgatcgtcctcgaggacctgaacttcggttttaagcatggtcgttttaaagttgaaaaacaggtataccaaaatttcgaaaacgcgttaatcaagaagctgaattacctggttctgaaaaatgccgataatcatcagctgggcagcgttcgtaaagcattacaattaacaaataacttcacagatattaaatcaatcggcaaacagactggattcattttttatgtgcctgcttggaataccagtaaaatagacccgactaccggtttcgttgatttgctcaaaccgcgttatgagaatatggcacaagcgcagtcgttcattagtcgttttaagaagatcgcatacaatcaccaactggattatttcgagttcgaatttgattacgctgatttttaccaaaaaaccatagacaaaaaacgtatctggacgctttgtacatacggagacgtacgttattattatgatcacaaaaccaaagagacaaaaaccgtgaacataacaaaagaattaaaaagcctcctcgataaacatgatctttcttaccagaatggtcacaatctggttgacgaactggccaattcccatgacaaaagccttctttctggggtcatgtatctgttgaaggtgctcctggcattacgttatagccacgcccaaaaaaacgaggacttcattttgagtcccgttatgaacaaagatggtgtgttttttgattccagatttgccgatgacgtattaccgaataatgcggatgccaacggggcctaccatattgctcttaaagggctgtgggttcttaaccaaatccagtccgctgataacatggacaagatcgatctttcaattagcaatgaacaatggcttcattttacacaatcccgtaaacgtccggcagcgactaagaaggcggggcaagctaagaagaaaaaggggtcgggtcctgctgccaagagggtcaagttggacggcagtggtcatcaccatcatcatcattaa

SEQ ID NO: 713 - DNA, 3966 bp, synthetic construct
  misc_feature 1..3966: note = Sequence codon optimized for E. coli expression
  source 1..3966: mol_type = other DNA
atgaaagattttacgcatcagtattccctgtctaaaactctgcgctttgagctgaagcccgtaggcgaaacagcggaacgaattgaggactttaaaaatcagggtttaaaatcgatcgtggaagaggatcgccagcgcgcggaagattataaaaagatgaaacgcattctggatgattaccacaaagagtttattgaagaagtactcaacgatgatatttttacagcgaacgaaatggaatctgcgtttgaagtatatcgtaaatatatggcctcaaaaaatgatgataaactgaagaaggaaattacagagatctttacagacctgagaaagaagatagcgaaggcctttgagaacaagtcaaaagaatattgtctgtataaaggagatttttctaaactgataaatgaaaagaagactggaaaggacaaagggccggggaaactgtggtattggctgaaagcaaaagcagatgcaggtgtcaacgaattcggcgatggtcagacttttgagcaggcggaggaagcacttgctaagtttaacaattttagcacgtattttaccggatttaaccaaaatagagacaacatttacaccgatgcggaacagcagactgccatctcatatcgcgtcattaacgagaatatgacccgttatttcgacaactgcattcgatacagtagcatagaaaataagtatccggaactggttaaacaactggaaccattatcaggtaaatttgcaccgggtaattataaggattatctttcacaaactgctatcgatatatataatgaagcagtcggccacaagtccgatgatatcaacgccaaaggtattaaccagtttattaatgaataccgccaaagaaacagtattaaaggacgtgagctcccaatcatgtcagtgctgtataaacagatattatcggacatcaataaagatcttattatagacaaattcgaaaatgcgggtgaactgttagacgcagtaaaaactcttcaccgcgagttaaccgacaaaaaaatcctgctcaaaattaagcagactctcaatgagttcctgacagaggacaacagtgaagatatctatataaaaagcggcacagatcttactgcagtgtctaatgcaatttggggggaatggtctgttattccgaaggccctggagatgtatgctgagaacataactgacatgaacgctaaggcgcgcgagaagtggttgaaacgagaagcgtatcatttaaaaaccgttcaggaagcaatcgaagcgtatttgaaagataatgaagaatttgaaacgcggaacatatcagaatatttcacaaattttaagtctggcgaaaatgatttgatacaggtggtacagtctgcctacgctaaaatggaaagtatctttggaatcgaagactttcataaagatcgccgtccggtgaccgagtccggagaacccggcgaaggctttcgccaggtagaattggtgcgggagtatcttgattcattgattaacgtggagcattttattaaaccattgcatatgttccggtcgggtaaacctatcgagctggaggattgcaatagcaacttctatgatcctctcaacgaggcctataaggagctcgatgttgtttttgggatatataataaagttcggaattacgtcactcagaagccttattcgaaagacaaatttaaaattaatttccagaattcaacgttacttgatgggtgggatgttaataaggagtcagcgaattcgtcagtgctcttactcaaaaacggtaaatattatcttggtgtgatgaaacagggcgcttctaatattctcaattaccgccccgaaccttcggactcgaaaaataaaattaacgccaaaaagcagctgtccgaaatcgcactggccggtgcgaccgacgattactatgaaaaaatgatctataaactgctgccggatccagcaaagatgctgccgaaagtcttcttcagcgcaaaaaatatcgaattttataacccaagtcaggaaattatctacatccgtgagaatggccttttcaaaaaagacgctggggataaagaatctctcaagaaatggattgggttcatgaaaacaagtctgctgaaacacccagaatggggatcttattttaattttgaatttgaacccgcagaggattatcaggacatctctatcttttacaagcaggtagcagagcagggctattcagttacttttgataaaataaaaacatcatatattgaagagaaagttgcatctggagagctgtacctctttgagatttataacaaggatttttcaccgcatagtaagggacgaccgaatttacacaccatgtattggaaatccctgttcgagaaagagaatctgcagaacctggtcacaaaactcaacggtgaggcggaagtttttttccggcagcattctatcaaaagaaatgaaaaggttgtccatagagcgaatcggccaattcaaaataaaaaccccctcaccgaaaaaaagcagtcaatttttgagtatgacctggtcaaggatcgtcggttcacaaaggataagttttttctgcactgtcccattacgctgaacttcaaagaagccgggcctggcagatttaatgacaaagttaataaatacatagctggcaatccggatatacgaataattggtattgatagaggtgagcgccacttgctttactactcccttatagatcagagcggtagaatcgttgagcaaggaacacttaatcagattacgtcaacactgaatagtgggggacgcgaaattccaaagaccacggactatcgcggcctgcttgatacgaaagaaaaagaaagagataaagctcgtaagagttggtccatgattgaaaacattaaagaattaaaatccgggtacctgtcacatattgtacataaattagctaaactgatggtgaaaaacaacgcggtggttgttctggaagatttgaatttcggcttcaagcgtggccgatttaaagtagaaaaacaggtttaccaaaaatttgaaaaagcgttaattgagaaacttaattatctggtgttcaaagatgcacgccccgctgagccgggtcattatctgaatgcttaccagttgacggctccactggaaagttttaaaaaattaggcaagcagtcaggttttatatattatgtgcccgcctggaacacctctaaaattgaccccgtgacgggttttgtaaatcagttttatattgaaaaaaactctatgcagtatcttaaaaattttttcggaaaattcgatagtattcgctttaatcccgataagaattattttgaatttgggtttgattataaaaactttcataacaaagcagccaaatccaaatggacgatttgcactcacggtgacaagcgctcgtggtataaccgtaagcagcgaaaactggaaattcataatgtgaccgagaatctcgcttcactcctgagtggtaaaggcattaactttgcggatgggggttctataaaagataaaattttgtcggtcgatgacgccagtttctttaaaagtttagcgttcaacttcaagttaactgcacagctgagacataccttcgaagataacggagaggagattgattgtattatctctccggttgccgccgccgatggtacgtttttctgttcagaaaccgccaaaaaactgaatatggaattaccccacgacgcagatgccaatggggcatataatatagcacgcaaaggacttatggtgcttcggcaaatccgtgagtccgggaaaccgaagcccattagcaatgcagattggttggattttgcacagcaaaatgaggataaacgtccggcagcgactaagaaggcggggcaagctaagaagaaaaaggggtcgggtcctgctgccaagagggtcaagttggacggcagtggtcatcaccatcatcatcattaa

SEQ ID NO: 714 - DNA, 3726 bp, synthetic construct
  misc_feature 1..3726: note = Sequence codon optimized for E. coli expression
  source 1..3726: mol_type = other DNA
atgaaacagagcacgcagtatgatgattttacgaatgtgtattcactgagcaaaactctgcggtttgagctgaaacctgatcctcttacagcagagtatattgagaaagagcaaatgttagaaaaggataaatccatttctcagtcttatcaggagatcaaagagtactttgatagactgcaccgcgactttatcaatgaagcactggccaaagtgaatttagattgttcccattattgggaattatttcaggccaaggataagaaagcactgcaaattgaagccgacaaactccgtaagaacttcggaactgctttcaacttggtgggtcgccaatggagtaaactggccggaatcaaagaagaaaacgaagagaatgaagggaacaaagaccagtccaaataccgtgatattctctttaaaaaagaagtgctggatatcattaaagctcggtacggccagggtgatgcacgtttagccgccctgctggagacctttaagaatttctttacatattttattaattttaacgagtcacgtaagaatttctataagctggatggtacgagtacagccatcgccactagaagcatagatgtgaatttaaaaattttttgctcaaatatagcgaatgtgcaatatttaccggatggcattcagttgacagatgaggaacgcagcttatttgaaattcggaattatcagacgtttttgcagcaagaaaaaattaaacaatataacgatctgataggtactatcaacgggaaaattaacaactatcgtcaggccaaccatcaaaaaataggctttttaaaaatcttacagaagcaaattttaggggatgccaacaaccctagcacaaaattcattgagataaccgacgatgcatccgtgtttccggttctgaatgagctgataaataatgccgaagaaccgtttcgtaaattttacaaagaactgctgccgaaaatactgcctgatactacggataactccatcgatctgtcgaaagtctacctttctaaggttgctctgaacactatctcctcgaaagtgtgtcaaagctggtgtacactcaaagacattttggaaaaaaaaaatgatttcagtttagacaatgttctgacctccttaaaaaataatcagcagcaagcaaaagaaatcttccgtgacgatgtcctgaagaattttctggcagacagtaacgataaaatttttaaaaaatggctctacaatgaatatcaaaaatcatatgaacgttattgcgcagcgaaggacgtgttactgtgcaagatggaacaggataaaagcttccggaaagaagatcaggaacagaaaaatataataaaagaattttgtgacgccgctctcgaagtttatagaatgatcaaatacttctacatcgaccggtctcagaattcagttgaggtggatccgatattctacaatattctggatcccattctggatgattgcagtgtgtatcaatactataacgagataagaaattatcttaccaagaaaccgttttcccaggataaaatcaagttaaactttggtaatggacagttactccaaggctgggatgaaaataaattgaaggactacaaaggcgctattttacgccacggcgatgattattatttaggcattctcatgggtaaccaggtattccaaactaataataaagaagcctatttggataacaccaacgggcacggttgggagctcatgatttacaaacagattgccgacgcgcaaaaagacgttccccgtctgttttttgctaaagcgaacttggctttgtttcaaccatcggacaatattaaacggattaaagatagtaaaagctaccttcgatccagcgacaatttctcctctcaagatctgtatgatttaatcgattattataaatcgtgtattgaaaagtaccccaattggcaatgttatgacttccattttctgcctacggaggaatacaaaaacatgaaagattttactgacgacatccaatcttgtgcttacaaagtaaagttcgttcctgtacgggatcaatatattaaagaacagcagagtcaaaaacaaagccagaaacagtcccaagtgggtttattattatttaaaataactaacagagactttttaccgcaagcccacggttgcgacaacttacataccaaatactttcgagcgctgtttgatcaggagaatttacagcatcctgttattaagctgaatggaggagcggagattttctttcgtcaggcatccataaccccgaaacttgtagaacgaggtcagaaatgtattattgaaaatcggcgctatactgaagataaatacttattccattttccgattaccctcaatgtcaatcacaagattacccctcgtgcatttcgcgctaagataaacaatttgctgtataccaaccctaatatcaatatcattggcattgaccggggcgaaaatcatctcctgtatatctcggtagttaatcagaaaggtgaaattttggacggacctagacctctggatacagttaacggaattgattatttgggtttgctggaaaaagtaagtaaagaccgtgatcgtgcccgtaaaaactgggaaagtatagccaaaattaaggacttaaaagctggatacgtcgggcaggttgttaaagtgatcgccgacctggcgctgcaatataatgcgattgtagtgttagaggatcttaacaccggctttaaacgctcccggcaaaaaatagaaaaacagatttaccagaacttcgaattggctcttattaataagttaaattactttgtaaaaaaggaagctatgccaggcgagaagggccactttctgtcagctttccagttaacggagccaataaccagttaccaagacgttggtaaacagacagggatcatattctatgttccggctgactatactagtatcacctgcccacagtgtggctttcataagagttttaatttttatcataaaaacaagaccgaggacgaacacttattaaagacgatggatctccgttatgataacgatgacgaatgttttaagctgacctgcaatctgatggcgctgagcaataataaaaagcaagacaacaatgaacttgaattaagtagcaaaaatattcaacgatggcgttgggggacaaataaacgtgagttagtgtcgtatgatattactaaatgcttagcggaactttttagtaaattacaaatcaattatactcaagaacggggtaaccttcttaatttatttatttcgcagcagccgacgagccaggactacgatgccttaattttttatttgcagctttggcaaaaaatacggaacagttcccccacgtccccagattacattcagtgcccccattgtggttttcactcggataacgggtttcgtgggaaggaatggaatggtgacgccaatggtagttacaatattgctagaaaaggcatcctgatactgggtaaaatcaaacaatttggcgacaatcatcacgaccgcgatcaagaacacatttttgatgatctgaaatggagtgatctctccattaatactgaagaatggaatgagtatgtaggacggcaaaaacgtccggcagcgactaagaaggcggggcaagctaagaagaaaaaggggtcgggtcctgctgccaagagggtcaagttggacggcagtggtcatcaccatcatcatcattaa

SEQ ID NO: 715 - DNA, 4005 bp, synthetic construct
  misc_feature 1..4005: note = Sequence codon optimized for E. coli expression
  source 1..4005: mol_type = other DNA
atgaacgcccagaaatcgttctttggcgactttaccaacttgtacagcttgcaaaaaacattgcgctttgagcttgaaccacaaggcaaaacgctggaacatatcgagaacaaagggttgatttctcaggacgaacagcgggcagaatcttataaaaaaatgaaaaagactattgatggattccataaacattttatagaaattgccatgagtcaggttaaactcacaaaacttaaagaatttgtagacctgtataatgcgtcacccgagcgtaaaaaggaagatggttttaaaaaaagcttcgaaaaagttcagacggagttacgcaaggaaatcgcaatgggcttccgtgccggtgaagccaaagagattttctccaaaattgacaaaaaagagcttgtcacagaccttcttgagaagtggatgcagactcaggaagaggacctctattttgacgaaagctttaaaactttcaccacttactttggaggtttccataaaaatagaaaaaatatgtatacagataaggagcagagcacctcgattgcctatcgtctcgttcatgaaaaccttcctaaatttcttgacaacatcaaagtatttgaacgtatcaaatcaatcccggtgctttatgaaaaatgtaccacattatacactgaaattaaagaacatctcgacattaaagatatcaacgaggccttcaatctttattgttataataaagtcctgactcagaaacagatagacgcgtataatcttgtaatagggggcatgactgcacaagaaggcaaaaaaaaaatccagggtctgaacgagcatatcaacctttacaaccagagacaggataaaaaagatcgtataccaaaattaaaacagttgtacaaacagatcctgtctgacagagaaagtgtcagttttctgccggaagctttcgaggacgatgagtctaaaacggcatctcaaaaggtgttgaattctatcgaagagtactatcaggcgaacttggtctcatttcatccgcgtgacaaagatgaagcagaaaatgtactggaaaaaatcaaagagctgctcacatcccttaaagattatgattccaacaagatctacctgcgtaatgacaaggctattacagatatctccaaggctctgtttggagactggggtatcatcaaagttgctctggaatttgcatttctgcagactttaaaaattggtgaaaaaggactgagtaagaaacaggagaaagaaaaggaaaactatattaaacagtctcatttctccgtggcagaaattgagaaagcactgtttgcttacaagaacgaagcagaagtcctgaacgaccttcatgaaaacactacacctttagcggactatttccataccaattttctcgcaaaaaagaaggaggaaagcgataaagaattcgacttaatcgccaatattcaggctaagtattcctgcataaaaggcattttaaaccgcgactatccaaaagaaaaacgtttacaccaagataaaaaaacaattggcgacattaaagcgttcttggattcgttaatggaacttttacactttgtgaagcagttgtccttaccctcagacaccacgctcgagaaagatgaaattttctattcccagtttcagccttggtatgatcaattgcagttgttaatcccgttgtacaataaagtccgtaattatgcaagtcaaaaaccgtatagcattgagaaattcaaactgaattttcagtcgagtacactggcgcaaggatgggatctgaacaaagagcacaataaaaattatagttttatcttccaagaaaatgactcattccttctgggcattatcaatatatatgatgataaagacattctgtcaaaagatacacggcctgagatctttgttgatgattcgcccctcaagaaaatggtgtacaagaatctgggagatattaaaagacagctgccgcgcattgccttcagcgataaagccaagaagtgtgtcgaaaagataggctggaaccaagaaatcgaagccatcaaaaaagagttcgatgagttccaggacgctaagaagaacgataaagatttgtggaaggacgaattcgatcgcaaccaactgtcagagttgatagactactacaaaggtgtacttaaaaatcatagcgaacgttatgaagacacatataaacttgaatataaaagcacggagagttataaaaacttgggcgagttttttgaccacattacttcccaaacttataaagtcacgttcgttgggatcgataaaaactacattaaccgactggttgatcagggtaaactctatctgtttcaaatttacaataaagacttctcagaatactccaaaggaaagccaaatctccataccttgtactggaaagctttatttgacccggagaatttgaaagatgttatgtacaagcttaatgggggtgccgaattattttatcgtaaaaagtcgataaaggacttggcgatacacaaagcaaacgaacctataaaaaataaaaatccgaacaatccgaaaaaggagtccgtgtttaaatatgaaatagtcaaggactaccggtacaccgtcgataaatttcattttcatgtcccgattaccctcaacttcaaggcaacagaagccgggtatataaataataccatattgggtttcctgaaagataatccggacgtgaatataattggaattgatcgcggtgaacgtcacctgatttatctgacgttaatagatcagcggggcaacatccttgaacagcgatcccttaataccattatcaataaaaaattcaacgttaagaccgattatcacggtttactggataatcgcgagaaggaacgcgataaagctcggaagaactggggtacgatcgaaaccatcaaagaattaaaagagggctatatcggcattattgtacacgagatctcacggatgatggttgaacataacgcgattgttgtgatggaagatctgaactttgggttcaaacgtggtagattcaaagttgaaaaacagatataccagaagttagagaaaaaactgatagacaagctgaactatttaatctttaaagacaaagctaacaatgagacgggtggtttgtataaagctttgcagttaaccagcaaattcgagtcctttatcaagcttggtaaacaatcgggattcctgttctacgtcccggcatggaacacgtctaaaatagatcctactacagggtttgtaaacctctttaatacacgctatgaaaacgctgataaagcgaagacttttttcgacaactttgaaaacatctgttataacgtagagaaggggtattttgaatttaaggttaagaaatactcgctgttcaatagtaaggctgatgatacgcggcaagaatggattatatgcacgcagggagaccgcattcgtacgtttcgtaatccagagaagtctaaccagtgggataacaaagaaattgttttgctggatgagttcaaaaacctcttcaaagaatatggcatccgttacgaggaagatctgaaacatcagatactcagtcagacggaaaaaacgtttttcgaaaaacttctgaacctgtttaaaattacagtacagatgcgcaactcaataacaaattcagaaaccgattacttaataagccctgtgatgaacgctaaaggtgagttttatgattcgcgaaaagccggcgataaccttccaaaggatgcggatgctaatggtgcgtatcatatcgcgaagaagggactgtggttactgaaacaaattgatgcgcatgaaggcgaagattggaaaaagttaaaattagccatcaccaataaagaatggctgcaatttgcacaggcacgcggacgtctgaaacgtccggcagcgactaagaaggcggggcaagctaagaagaaaaaggggtcgggtcctgctgccaagagggtcaagttggacggcagtggtcatcaccatcatcatcattaa

SEQ ID NO: 716 - DNA, 3909 bp, synthetic construct
  misc_feature 1..3909: note = Sequence codon optimized for E. coli expression
  source 1..3909: mol_type = other DNA
atggagcgtaaagatttcatcaattacgaccaggtatctaaaacaattcgaaatgggctgataccgacagaatatacattgaaaaatattgaagaaacaggtgtcttggttagcgacgagtaccgtgccgaggtcagaaacgttttaaagaagattatggatgattactataaagagtacattaacatgtgtctgaatcgcgaaattaaaatggattggcgccctctgtttgatgcgtatgagctggtaaaaaaaggcaaaatgaagcctaaagaaattgaaaatattcaggatgaaaaacggaaagaaatttatgatattctgtccgctcatgatgagtttaagaaaatgttttcagccaaaatgatcaccgaactgcttccgcagtttatctcccagagcaccggctataacgaagatgagaagaaacagtacgaagaagtaattcacatttacagtcgatttacatcggactttactgatttttttcaaaatagaaaaaatgtattctcatccgcggggatcgcaacttctatttgcaatcgcattgtgaatgagaatgcagaaatattcagtgataataagtctacttttgatcgcattaaaaaggatatttcatacatcgatgaaattatcgattcagatctcaaaacgtatcttgacgggtgggagttagaacaaatttattccgtagacttctatagccgtctgatgagtcagagtggaattgatttttataacatgattagtggcgctgtaaacaaagcagtgaatgagtattgtcagaaaaatggactgaataaaaataaatatttattacgtaaattacgcaagcaaatactcagcaactccgagagcacgtttcaaatcccggaaaagttcctggcagacgaagaagtttataaagctgtcggacagtttattgataacattaagagcaaaaatgtaattgagattttaaaagacatcggcagtaattgtgaaaattatgatctgcgtcggatttacattgcggaatcagcgtatgaagacgtctccatttttatgggctatggatggaacggtattaaaggctgccttgagaaaaaatatgaaaaagagattgcacctggcaaagccaaggatatcaaaatcaaaaaattgattagccaggaaaaagaacgctcaataggagaaattgacgaattgtttcatatctatggcgaagaaaaggacggcaaagcggctatccaatatattgaggaagtcgtggaactgtgtaatgaagtaccaacacgtctggtttatgattcttctgaaaaactgaccgaaaatgataataaagctgcagaaattaagaacgtgttagattattattttaagatattccattggatcaaaacgttcatcaccgatgatatccttgacaaagacattgtgttttatagcggtattgagtttgcttatgaggaaattaaagatattgttccgctctataacaaagtccgtaattacgtaacccagaaaccgtatagttccgaaaaaatcaaacttaagtttggtactcccacgttagccaatgggtggtccaaatctaaagagtttgacaataatgccatcctgctggttcgtgataataagtattacctgggcatattcaacgtgctgaataagccggataaaaaaattatggctggatatgccaacaagaagaatagttctgattacgccaaaatggtttacaatttactgcctgggccgtccaagatgcttccgaaagtatgcctttcacagaagggcaaagacacgtatcacccaagcgcttacatcgttgacaattatgaacgtaaagcccatgtgaagagcagcgagcatttctccattcaatattgtcacgacttgatcgattactttaaggaatgtataaaacgcaatgatgattggaaatgttttgatttcaaattttcagacaccgaacagtataacgatatttctgaattctacaaggaagtcgaactccaggggtacagcattggttggacctatatttcaggtgaagacattgaggccctggataaagaaggcaaactgtatctgttccagatttataataaagatttttccgaacagtcacatggaacggataatttgcatactatgtatttaaaaaatctgttttcgccagaaaacctcaataatatagttcttaagcttaacggcgaggctgaactgttttatcggaaatccagcatcaagaagccggttgtacataagaaaggctcaatactggtcaacaaaacgtacaccgaaaaaaccggaaacggtgaggaggtgcgtcgtccggtacctgacgatgtttatctggaactggttaattattataatggtgaacagaaggcaatcttgtctgatgaagctaaaaaatatatgaaagttgttgaacaccacgaagccgtcaaggatatcaccaaggactatcgttataccgttaacaagtttttcattcatttaccgatcactattaactttaaagccgaacacacgggcaatctcaacgaaatggtaatacaatacattgcaaagcaggaaaatatgcacgtaatcggcattgaccgcggtgaacggaatcttatctatgtgtctgtgatcgatatgaatggtaagattaaagaacagaagagttttaatatcgtgaattcttacaattatcaggaaaaattgcgaggtcgcgaaaaagatcgtcttaacgcacgcaaaaactggaagcagatcgcaaacattaaagaaatgaaagaaggctacttgagcttggtaatccatgagattacagagatgatgatgaaatataatgcgattatcgcaatggaagatctgaattacggttttaaacggggtcgcttcaaagttgaacggcaggtgtatcagaaatttgaaacaatgctgatcagtaaattaaattacctcgttgacaaacataaaaaagttgacgaaccgggtggtcttttaagaggttatcagtttgcatatgtgccagcttcgttggatcgactgggtcgtcagtgtggctttatcttctatgtcccggctgcatatacaagcaagatcgatccgactactggctttgtagatctgttcaaccattccgaacttattaaagcgggtaagagacgcgataacctgagcaagtttgacgggatatattacgatgaacaaaaagacatgttctgttatgcgttcgattataagaactttgttacacataatacggatatttaccaaaatagttgggaaatatacaccaataaggaacggctccgtaaaatttttggtaacggaagaccaactgggaaaaccgaaaagattgagctgacccaaatgatgaaagaagttctgactggtgcaggggtagagtataaagacggtcataacttaatcgacgatatactgaatagtaatgataattgcattaaacaggtgctggatatattcttatatagtatccaactgcgtaatagcaaaggagagaatgaagactctaaagaaagtgattacgatcgtattatctctcctgtcttaaaccaagaaaatgagttctttgattctgtagtctatgccgataagtacaaaaaagacgagaagcttgcagacaaaccgatcgacgcggacgcgaacggtgcttattgcatagcattaaagggtctctatgaaatactccaaattaaaaacaactggaaagaaggtgaagttttcagtcgtgacacactgaagatcacaaatgcagattggcttcgttttatgcagtctcgcggctttgaaaaacgtccggcagcgactaagaaggcggggcaagctaagaagaaaaaggggtcgggtcctgctgccaagagggtcaagttggacggcagtggtcatcaccatcatcatcattaa

SEQ ID NO: 717 - DNA, 3954 bp, synthetic construct
  misc_feature 1..3954: note = Sequence codon optimized for E. coli expression
  source 1..3954: mol_type = other DNA
atgaacaagttcgaaaatttcacgggactgtaccctataagtaaaacgttgcgttttgaactcatccctcagggaaaaacgctcgagtatattgagaagagcgaaatccttgaaaatgataactatcgcgcggaaaaatacgaagaggttaaggatatcatagatggctatcataagtggtttataaacgaaacgttacacgatttgcatattaattggagtgaactcaaagtggcgttggagaacaatcggatcgaaaaaagcgacgctagcaaaaaagagcttcagcgggttcaaaaaattaaacgtgaggaaatttataacgcctttatagaacatgaagcgttccagtatctgttcaaagaaaacttgttgtctgatctgttgcctattcagatcgaacagagcgaggatctggatgccgaaaaaaaaaagcaagctgtggaaacatttaatcgttttagtacctatttcaccggcttccatgaaaaccggaaaaacatctactccaaagaaggaatatcaacatctgtcacctatcgtatagtacatgataatttccccaaatttctggaaaacatgaaggtcttcgaaattcttcggaacgaatgtccggaggttatatccgatactgccaatgagctggccccttttatcgatggagtacgcattgaagatatatttctcattgattttttcaacagtacattcagccagaacggtatcgattactataatcgtatcctgggaggggtcaccactgagacgggtgagaaatacagaggcattaacgaattcaccaatctctacagacagcagcatccagaatttggaaaatctaaaaaagcaacaaaaatggtcgtgctttttaagcagattctgtctgatcgcgatacattatcgtttattcctgagatgtttggtaatgacaaacaggtccaaaattctatccagctgttttataaccgcgaaatctcgcagtttgaaaatgaaggagtgaaaacggacgtgtgcactgcgctggccacattaaccagcaaaattgcagaatttgacacggaaaaaatttatattcagcaaccagagttaccaaatgtgtcccagcggttgttcggcagttggaacgaattgaacgcctgcttatttaagtatgcggaactcaaatttggtaccgcggagaaagtcgcgaatcgcaagaaaatagataaatggttaaaaagtgatcttttctcctttaccgaactgaataaagctttggagtttagtggcaaagatgagcgtattgaaaactatttttcagaaacgggcatctttgcacaacttgtgaagacaggttttgacgaagcccaatctatcctggagacagaatacacatcggaagtccatctcaaggatcagcaaactgacatagaaaaaataaaaactttccttgacgccctgcaaaatcttatgcatttattaaaaagcctgtgtgtcagcgaggaagccgatcgcgatgccgccttctataatgagtttgatatgctctataaccagctgaaactggttgtcccgctttataacaaagtacgcaattacataacacaaaaactgttcagatcggacaaaattaagatctactttgaaaataaagggcagttcttgggaggttgggtcgactcccagactgaaaacagtgataatggaactcaagccggtggatatatttttcgtaaagaaaacgtgattaatgaatatgattactatctgggtatttgctcagatccaaaactgtttagacgtacaaccattgtcagtgaaaacgatcgatcttcgtttgaacgtttagattattaccagcttaaaacggcttcggtctatggaaattcctactgtgggaagcatccctacacggaagacaaaaatgaattagtgaattccattgatcgtttcgtccatctgtcagggaataatatccttattgaaaagattgccaaagataaagttaagagtaacccaacgacgaataccccttcgggctatctcaactttattcatcgtgaagccccgaacacatatgagtgcctcttgcaggatgaaaattttgttagcttgaatcaacgggttgtgtctgccttgaaggcgacattggctactctcgtgcgtgttcccaaggcgctggtttatgccaaaaaggactaccatttatttagtgagattattaacgatatcgacgaattgtcttatgaaaaagcatttagttactttccggtatcccagactgagttcgagaactccagcaaccgtacaataaaaccactgttactttttaaaatttcgaacaaagatttgagtttcgccgaaaatttcgaaaaaggcaatcgccaaaaaattgggaaaaagaacctgcataccttatactttgaagctttaatgaaaggtaatcaagatacgattgatatcggaaccggtatggtgtttcatcgtgttaaatctctgaattataatgaaaaaacgttaaaatatggccatcatagcacacaactgaatgagaaattctcttatccgataatcaaggataagcgctttgcgagcgataaatttctgtttcatttgtccacggagattaactataaagaaaaacgcaagcccctcaataattcaattatagaattccttacaaacaatcccgatatcaatattattggccttgatcgtggggagcggcatcttatttaccttacactcataaaccaaaaaggagaaattttacgtcagaaaacattcaatatcgttggcaataccaattatcatgaaaaactgaaccagcgggaaaaagaacgtgataatgctagaaaatcttgggccacgatcgggaaaatcaaagagttaaaggaaggctttcttagcctggttatccatgaaatagcaaaaataatggtggagaacaacgcgatagttgtgcttgaagatttaaactttggttttaaacgggggcgattcaaagtggaaaagcaaatttatcagaaatttgaaaagatgttgatagataaactcaactatctggtgtttaaagataagaaagcgaacgaggcaggtggggtgttaaagggttaccagttagccgagaagttcgagagttttcagaaaatggggaaacagtccggttttttattttacgtgcccgccgcgtatacctctaaaattgacccaaccactggttttgtgaatatgttaaacttgaattatacaaatatgaaggatgcgcaaactctgctgtcgggaatggacaagatttctttcaatgccgacgcaaactacttcgagttcgaattagattatgaaaaatttaaaaccaaccagacagatcatactaataaatggacgatttgtacagtgggagaaaaacgctttacctataattctgctactaaagagaccactactgtgaatgtgaccgaggatcttaagaagcttctggataaatttgaagtcaagtatagtaacggtgacaatattaaggatgaaatctgccgccagaccgatgcaaaatttttcgagattatcctttggctgttaaaactgaccatgcaaatgcgtaatagcaataccaagaccgaggaagactttatattaagcccagtgaaaaatagtaatggggaattttttcgttcgaatgatgacgcaaatggaatttggccggcagatgccgatgcaaatggcgcctatcatatagctctgaaaggactgtatctggttaaagagtgcttcaataaaaacgaaaaaagtcttaaaattgagcataaaaattggtttaaatttgcacagacccgtttcaatggtagtttaaccaaaaacggcaaacgtccggcagcgactaagaaggcggggcaagctaagaagaaaaaggggtcgggtcctgctgccaagagggtcaagttggacggcagtggtcatcaccatcatcatcattaa

SEQ ID NO: 718 - DNA, 4053 bp, synthetic construct
  misc_feature 1..4053: note = Sequence codon optimized for E. coli expression
  source 1..4053: mol_type = other DNA
atgctggaccgcttcactaatcagtatagtgtgaccaaaactctgaagttcgaattacgtcccatgggcaaaacccttgaacatgttcaaaaaaaaggatttgtggaaactgatgaaaagctggccacgaattataagagaattaaaaagactattgatgtatatcacaaagactttattagtcgcgcactttcacagctgtcgatctctaatcttgatgaatttctggcttcatacgaagataacaaaaagaatccggacgataagacgaagaaacaattggtgcgaatccaggataatctgcgcaagcaaataaccagtgcgttcaccgctgccgaattcaaaacagagttctcagaactgtttaagaaagaactgctgactaaaaacctcgaatcgtttgtcttggagtataataaaaaaaatgatgcggatttgttcttcgttgatgatttcaaaaattttgcaacttacttcatcggatttcatgaaaatcgcaaaaatatctacagcgccgatgcgaaacatactgctctggcctttcgtattattcatgaaaacctccctaaatttatcgaaaatatgaacagcctccaactgattaaagatgactacccagccttatatgagtcactccagaaccaggtttctaccgagttaagttctatattttcagcgggttttgtcttggatgacgtcttgaatattagtttctataatgagctgctgagtcagcaggggatcgaccggttcaatcagctgatcggcggcgtaagcactcagagcggagccaaaaaaacacagggtttgaatgagttaattaatgagtataatcagcagtcccccagatcttctggcaatcgaaaagccccgaaaattcgcccactttacaaacagatcctcagtgatcggggaagcctctcatttttaccggaaaaattcgcggatgatcgcgaattgtacgacgccattaatgactattacttgtctcacctgctgatggtaccaaatgatagctcagaacacacgctgcttgactctctcaaacatctggtggcttccctgccctcctttgatctgacaaagatctatctgaaaaacgacaaagcaatttcgtcaatttccaaccgtttgtttggtgattattctgtacttcctatagcactgggttattattacgaccatcacataaatccggatcacttggaccaactcgcggcggcaaaatctcagaagaaaacttcagacttgtataaaaagaaagacgcttttaccaaaggttatcatagcgtagccactattgaagcagcctatcaggcatatttggcaagcaccgactcagataatgggcttcgtaaatcaggcattataaatccagtacaggattactttacacgctatttcgtgaacgaaccaaaagaagatggcaaggcggctgttgaccttttgcgtgacatagataacaaatacaccacgattaaaggcgtactgaacagtgagatcgaagaaggcacccggcagcttctccagaaaggtgccgaggtagccaatattaaacacttcctcgacgctgtgatgaacctgatacatttcgtcaaacctctggggagcgtgattgaagaggacagtttgcttgatatcgacgcccggttctataatgattttttgccattatatgaagaactgaagttatttttccctctgtacaataaagtgcgtaattatatcagtcagaaaccttattccaatgagcagttcaaattgaattttgagaacgctaacctgttagaagggtgggatgtcaataaagaaaaatctcgtcttagcgtgcttttgcaaagagatgggcggtattatctggccctgatggataaatcacataaaaaagtctttgagcaggcacccgaaataaccccgggatccgaaaactcaaatagcccttatcaaaaaatgcgttataaactcctgccggggcctaataaaatgttccctaaagttttctttgcaaagggtaacattgattattttgctccatcacaacagcttttggaaaactacgaaaagggaactcacaaaaagggcgatgattttaatatagaacactgccatcagttaattgattttttcaagcaaagtgttgccaagcacaaagactggcacgaatttgggtttaaattttcagacacctcaacgtataaagacatttccgaattttataacgaagtctcgaaacagggctataaggttacgttcgaagatgtagatgcagactacattgacactttagttgaaaatggtcagttgtatttatttgaaatctacaataaagatttctctgtcaatagccgggggaaacctaatttacacacaatttacttcaaagccctgtttgatgatgaaaatctcaaggacgccgtctataaattgaatggtgagggtgagctcttttacagaaaagcatcgatcgaccccgagaataccataaaacataaaaaaggtgaacgcgtatacagtaaaaacccgttgacaccggatgcttcaagagttttagattacgagattgttaaagataaacgttacacggccgataaattcctgctgcatctgccggtcaccatgaattttaaagccgacggtattgggccgggtcagtttaataatcttgtaaaagatacaatccgcgacgatcagaataaggacatgcatcttatcggcatagaccgaggggaacgtcacctgttatatctgaccgtaattaaccaggatggtctcataattcaccaagaaagtttaaacgatgtagtttcaagtaataaaacagttactccatatcatactctgcttgacacccgtgagaaagaacgtgatgatgctcgaaaaaactggggagtgattgagaatattaaagatctgaaaaaaggttatctgtcacaagtcgttcataaactggctaaactgatctacgaatataacgcggttgtagtgctcgaagatctcaatttcggtttcaaacgcgggcgcttcaaagtggagaaacaggtataccaggcatttgaaaaagcacttatcgataaacttaattatctggtatttaaagagttcgaatccgacgcactggggggcgcgcgcaaagccttacagctgacctcagcattcacggcttttaaggatctgggcaaacagacagggtttctgttttatgtcccggcctggaataccagcaaaatcgatcctgtaacaggatttgtagatttgttaaaaccgaagtatgaaaatgtggagcaggccaaggatttcatcgatcgcttcgactcaattcgctataataaagaaaaagatttcttcgagttcgaatttgactattcgaactttggcacacgcgcccaggatacgcgtacggactggaccatttgcagccatggaacgaaacgttatgtttacgataaaaatgctaacaacaataagggcggccaaaaacaaatagatgtaaacaccgagttaaaagccctgttctccagttatgatattgactatcatggtgagctggcgggacgagacttacgtccgatgatcaagtcaaaaggcgacaaatcgatgtattcatctatcatttttttattgaaaaccctgctcgctatgcgctactccaaaacgaatggtagtaaagtggaggattttatccttagcccggtgtctaatgatgctggcgtgtttttcgatacccgcgattacgacggtatggacgctgatagcagtagtgagacatctactgtccttccgaaagatgctgatgcgaatggggcataccacatagctttgaaagggttatgggtgatgcgccagatacaatctcatacgggtgacgattacaaaggcttagatctgaagataacgaacaaaaactggctggagttcgtacaaactaaaccttatcagaagaaacgtccggcagcgactaagaaggcggggcaagctaagaagaaaaaggggtcgggtcctgctgccaagagggtcaagttggacggcagtggtcatcaccatcatcatcattaa

SEQ ID NO: 719 - DNA, 3861 bp, synthetic construct
  misc_feature 1..3861: note = Sequence codon optimized for E. coli expression
  source 1..3861: mol_type = other DNA
atgaaaaaaattgactcattcaccaattgttacagcttgagcaaaactcttcgttttaagttgattccgattggcgccactcagagtaattttgacttaaataaaatgctcgacgaagacaaaaagcgcgctgagaactattccaaggcgaaatccataattgataaatatcatcgtttttttatagataaagtgttgagctcggttactgaaaataaggcgtttgacagtttcttagaagatgttcgggcatatgctgaactctactatcgaagtaataaagacgatagcgataaagctagtatgaaaacactggaatcaaaaatgcgcaagttcatcgcacttgcactgcagtccgatgaggggtttaaggatctgtttggccagaaccttattaaaaaaacattgcctgaatttcttgaatcagatactgataaagagataatagctgaattcgacggcttctcgacctacttcacgggcttttttaataaccggaaaaatatgtactcagcagatgatcagccaactgcaatttcttaccggtgcatcaatgataatctgccaaaaatactggataatgttcgcacgtttaaaaactcagacgtcgcgaatattcttaacaacaacctgaaaatcctgaatgaagattttgatgggatttatggaacatctgcggaagacgtcttcaacgtggattatttcccttttgttctgtctcaaaagggcatcgaagcctacaatagtatactgggggggtatacaaactcggacgggagcaaaataaagggtttaaacgaatatataaatctctacaatcagaaaaacggcaatatccaccgtatcccgaaaatgaaacaactgtttaaacagattctgagtgaacgtgaatcggtatcattcattcccgagaagttcgactcagatgatgatgtgttatccagcattaacgattattatttggagcgcgatggaggcaaagttttaagcatcgagaagacggtggagaagatcgaaaaattgtttagcgccgtgacagactacagcacggatggtatatttgtcaaaaatgcagcagaactcactgctgtctgctctggcgcattcggatactggggtacagttcaaaatgcgtggaataacgagtatgacgccctgaatggctataaagaaactgaaaaatatattgataagagaaaaaaagcatataagtcagtagagagctttagtattgccgatatccaaaagtatgcagatgtgtcggagtctagcgaaacaaatgctgaagtgaccgaatggctgcgtaatgaaataaaggagaaatgcaatttagcagttcaagggtacgaaagctccaaagatttaatcagtaaaccatatactgagtcgaaaaaactgttcaacaatgataatgctgtcgaacttataaaaaatgcgcttgacagcgtaaaagagctggagaatgtgcttcggctgcttcttggcacggggaaagaggaatcgaaagacgagaacttttacggtgaattcctgccctgctatgaacgcatatgtgaagtggatagcctgtacgataaagtgcgtaattatatgacacagaaactgtataaaacagacaagattaaacttaatttccacaatccgcagtttcttggcggctgggatcgaaataaagaggccgactacagcgccgttctgctgcgacgtaactcgctgtattacatagcaatcatgcccagtgggtacaaacgtgtgtttgagaaaatcccggccccaaaagccgacgagacggtgtatgaaaaagtgatatataagctgttaccgggtccaaataagatgctgcccaaagttttttttagcaaaaaaggcatcgagacctttaaccctccgaaggaaatcctggaaaaatatgaacttggcacacacaaaactggtgacggttttaatctcgatgattgtcgggcgctgattgattattttaaatcagcgatagatgtgcatagcgattggtcaaacttcgggttcagattctccgatacgagcacgtataagaacattgcggacttttataatgaggtgaaaaatcaaggttataaaattactttttgtgacgtccctgagtcctatattaatgaattagtcgatgagggcaaactgtatctctttcagctctataataaggattttagcgaacattcaaagggtacaccgaacttacatactttgtattttaaaatgttgtttgacgaacgtaatttagagaatgtcgttttcaaactgaacggtgaagctgaaatgttctatcgcgaggcctcgattagcaaggacgacatgattgtgcatcccaaaaatcaaccaataaaaaataaaaatgagcagaattctagaaagcagagcaccttcgaatacgacattgtgaaagatcgtcggtacaccgttgatcagtttatgctccacatacctattacgctgaactttacggcaaacgggggtacaaatattaataatgaggttcggaaggcgctgaaagattgtgataaaaactatgttatcggaatcgaccgaggtgagcgcaatctgctttatatttgcgttgtggattccgaggggcgtataatcgaacagtattcattgaatgaaatcattaacgaatacaatggcaacacgtattccaccgattatcacgcgttgttagataaaaaggaaaaagaacgattggaatctcgcaaagcctggaagacggttgaaaatatcaaagaattgaaagaagggtatattagtcaagtcgtgcataaaatttgcgagctggttgaaaagtatgacgctgtgattgttatggaagatctgaattttggtttcaaacaggggcgctcgggtaaatttgagaaatcagtgtatcaaaagtttgagaaaatgttaattgacaaattaaactatttcgctgataaaaagaaaagcccggaggaaattgggagcgtgttgaatgcataccagcttactaatgcgtttgaatcttttgaaaaaatgggtaaacagaatggtttcatcttttacgtcccagcgtatctcacgagtaagatcgatcccacgaccggattcgcggatctgctgcaccctagtagcaaacagtctaaagaaagtatgcgtgattttgttggccggttcgattcgattacattcaataaaaccgaaaactattttgagtttgaacttgattacaacaaatttccccgttgcaatactgattatcggaagaaatggaccgtgtgtacctatggcagtcgcattaaaacatttcggaacccagaaaaaaattcagagtgggataacaaaacagtggagttgacgcctgcttttatggcactctttgaaaaatattcaatcgatgtaaatggtgatatcaaggcccagataatgtcagtagataagaaagacttttttgttgaactcattggtttattgcgtcttacgctgcaaatgcgtaactcagaaactggtaaagttgatcgggattacctgatttccccggtgaaaaattccgaaggtgttttttataattcagatgattataaaggaattgagaacgcctctctgccaaaagatgctgatgccaatggtgcctataacattgccagaaaaggattatggattatcgaacagattaaagcctgtgaaaatgatgcagagttaaacaaaattagactggcaattagcaacgctgaatggctggaatacgcgcaaaaaaaaaaacgtccggcagcgactaagaaggcggggcaagctaagaagaaaaaggggtcgggtcctgctgccaagagggtcaagttggacggcagtggtcatcaccatcatcatcattaa

SEQ ID NO: 720 - DNA, 4020 bp, synthetic construct
  misc_feature 1..4020: note = Sequence codon optimized for E. coli expression
  source 1..4020: mol_type = other DNA
atggccgccttcgacaaatttattcaccagtatcaggtaagtaagactttacgcttcgcactgatccctcaggggaagactcttgaaaacacgaagaataatgtactgcaggaggatgacgaaagacaaaagaactacgaaaaggttaagccaattctcgacagaatttataaggtgttcgcggaggaatctttgaaagattgttctgtcgactggaatgacctcaatgcgtgcctggatgcatatcaaaaaaatccttcagcagataaacgccaaaaagttaaagccgctcaagatgccctccgtgacgagattgcaggttactttacggggaagcagtatgcgaatggcaaaaataaaaatgcagtgaaagaaaaggagcaggctgaattatataaagatatcttttcgaaaaaaatctttgatggcactgtcaccaataacaaactgccacaagttaatctgagtgctgaagaaactgagctgctgggctgctttgacaaattcaccacgtattttgtcggattttaccaaaaccgcgagaatgtatttagcggtgaggacatagccactgcgattccgcatcggattgtccaggataacttcccgaaatttcgcgaaaactgccgcatttaccaggacctgatcaaaaacgagcctgccctgaaacccctgcttcaacaggcagcggccgccgtaatggcacagaaccctaaaggcatctaccaaccacgcaagtctctggatgacatattcgtaatacctttttataatcatctgttactccaagatgatattgattattttaaccagatccttggaggtatatcgggtgcagctggtcaaaagaagattcaaggtcttaatgaaaccattaacctgttcatgcagcaacacccgcaggaagcagataagctgaaaaaaaagaaaatcagacaccgcttcattccgctgtataaacaaatccttagcgatcgtacctcttttagcttcattcccgaagcctttagcaatagtcaggaggccctggacgggattgagacatttaaaaaatctttaaaaaaaaatgatacctttggagcccttgagcgcctgattcagaaccttgcctcgcttgatcttaaatatgtgtatttaagcaataagaaagtaaacgaaatttctcaggcgctgtacggtgaatggcattgcatacaggatgttcttaaacaggacttttcactcgagtcgctcattcaaatcaaccctcagaactcttccaacggattcttagccactttaactgatgagggtaaaaaacgcatttctcaatgccgaaacgttttaggtaatccgctgccagtaaagctggcggacgatcaggacaaggcgcaggtgaaaaatcaacttgacacactgctggcggccgtccactacctcgagtggtttaaggcggatccggacctggaaactgacccgaatttcacagttccgtttgaaaaaatatgggaagagctggtccctcttttgagtctttattctaaagtccgtaactttgttactaaaaaaccttatagcacagccaaattcaaactgaactttgctaaccctaccctggcagacggctgggatatccataaggaaagcgacaatggggctttgctgtttgaaaaaggtggactctattaccttggtatcatgaatcctaaggataagccaaattttaaatcgtaccagggtgcggaaccttattaccaaaaaatggtgtaccgcttttttcctgactgtagcaagaccattccgaaatgttcaacacaacgaaaagatgttaaaaaatatttcgaagatcacccgcaagcaacaagttaccaaattcatgatagcaaaaaagaaaagtttcgtcaagacttttttgagatacctcgcgaaatctatgaattaaacaataccacctacggtaccgggaaaagtaaatataagaaatttcagacacagtattatcaaaaaactcaggataaatctggttaccaaaaagcactccgaaaatggatagatttttctaaaaagtttttacaaacctatgtgtctacctctatttttgattttaaagggttacgtccatcaaaagattaccaagatttgggggaattttacaaagatgttaattcgcgctgttatcgagtgaccttcgaaaagatacgcgtacaggatattcatgaggctgtcaaaaatggacagctctatctgtttcagttatataataaagacttttccccgaaaagccatggactgccaaatctgcataccttatattggaaagctgtatttgatcctgaaaatttgaaagatccgattgtgaaactgaatggccaagctgaactgttctatcgtccaaaatcaaacatgcagattatccagcataagacaggggaagagattgttaacaaaaaattgaaagatggaacccctgttcctgacgatatttatcgggagatttccgcatatgtgcaagggaagtgtcaggggaacttatctccagaagctgagaagtggctcccctccgtgacaattaaaaaggcagcgcacgacattaccaaagatcggcgttttacagaagacaagtttttttttcacgttcctatcaccctgaactatcagtcaagcggcaaaccaacagcttttaactcacaggtgaatgatttcctgaccgagcacccagagactaatattattgggattgaccggggtgaacgtaacctgatctatgcagtagtaattactcccgatggtaaaattttagagcaaaagtctttcaacgtcattcatgattttgactaccacgaatctctctcccagagagagaaacagagagttgcggctcgccaggcctggactgccatcggtcgcattaaagatctcaaggaaggctacctgagcctggttgttcatgaaatcgcgcagatgatgatcaagtatcaagctgttgttgtcctcgaaaacttaaacaccggctttaaacgtgtcagagggggtattagcgagaaagcggtctatcagcagttcgaaaagatgctcattgaaaaactgaatttcctggtttttaaagaccgcgccattaatcaagaaggaggtgttttaaaagcatatcagttaactgactctttcacctcttttgccaaacttggtaatcagtcaggctttctgttctatattcctagcgcgtatacgtctaaaatcgatccgggcaccggatttgttgatccgtttatctggagtcacgtaaccgcttccgaggagaatcgtaatgaatttttgaaaggttttgatagtctcaagtatgacgcacagtctagtgcctttgttctgcattttaaaatgaaaagtaacaaacagtttcagaagaataatgtagaaggatttatgcccgaatgggatatttgttttgagaaaaacgaagaaaaaattagtttacaaggcagcaaatatactgcgggtaaacgtatcatatttgatagcaaaaagaaacagtacatggagtgcttcccacagaacgaattaatgaaagccctgcaagacgttggtatcacttggaacacgggcaatgatatttggcaggatgttctgaaacaagcatccaccgatactggatttcggcaccgtatgattaacctgattcgctctgttcttcagatgcgcagctctaacggagcaactggcgaagattacattaactcaccagtcatggatttggacggtcgcttctttgacacccgtgcgggaattcgcgatttaccattagacgctgatgctaatggcgcgtatcatattgctcttaaaggacgaatggtgttagagcgtatccgttcacagaagaatactgctatcaaaaataccgactggctttacgcgattcaggaggagcggaataaacgtccggcagcgactaagaaggcggggcaagctaagaagaaaaaggggtcgggtcctgctgccaagagggtcaagttggacggcagtggtcatcaccatcatcatcattaa

SEQ ID NO: 721 - DNA, 3843 bp, synthetic construct
  misc_feature 1..3843: note = Sequence codon optimized for E. coli expression
  source 1..3843: mol_type = other DNA
atggttgccttcgttgatgaattcgtcggacagtatccagtttcaaagacgctgagatttgaagcgcggccggttccggaaaccaaaaaatggcttgaaagcgatcaatgttcggttctctttaacgatcagaagcgcaacgagtattacggtgtactgaaagaactgctggatgattattaccgcgcatacattgaggatacccttgccgcgtttactttagataaagcattgctggagaacgcctatggcttgtactgtaatcgcgataataatgcgttctcttcttgctgtgaaaaactgcgcaaagacctcgttaaagcttttgcgaatttaaaagattacctcctcgggagtgatcaattaaaagacttagtcaaactgaaggcaaaagtagccgacagtgcgggaaaaagcaaaaaaaagattgaggtagactcacgtctgttagcttggttgaaaaacaatgcgaagtatagtgcagaagatagagttaaatactgcgaggcaatagaagcatttgaaggttttgtaacctacctgaccaactataagcaggcccgagaaaacatgttttctagtgaagataaaagcactgccatcgcgttccgtgttatagatcaaaatatggtgacctattttggtaacattcggatttatgaaaagataaaagccaagtatcctgagctgtattcagcattaaaaggattcgagaagtttttttacccggcaggctattcagaaatcctgtctcaaaacaaaatcgacgagtataattacaaatgtattggacgcccggtcgaagacgccgactataaaggagttaacagtatcattaatgaatatcggcagaaaaaagggattaagagccgtgagcttcccgtaatgtctatgctttacaaacaaattctgagcgatcgtgacaacgattttatgagtgaggttattacctctaatgaagaagcaattgaatgcgcgaaagctgggtataaaaaaagctatattctgttcaatgaacttctgcagctgtttaacaacagttttatagaagaaaactacgagtatatctacatcaagacacaaccgttaactgaattgagccagagtctctttggcgattggtctgtgctgcggaatgcactggacaatgccaaatacgataaagaaataatcaacctcgcggagctggttcggtatttctcagagtattgccagattctggatgcggacgatgcggtcaaaattaagaacaaatttattttagaggactactttgtgcaagacacactggaagcggcactcccagatctggataaaatcacgcagtataaaacctaccttgacaacatgttacaagttatacggaagtaccgtctttttagcatgtataatggtagaaaaaagttagatgtacctgagaaaggcatggacttctctaacgaatttaacgatatttatgataagctttcggaattttcaattctgtatgatcgtatccgcaattttgcaactaaacgtccttactccgatgaaaaaatgaaactgtcattcaatatgcctacaatgctcgctgggtgggactataataatgagacagcaaatggatgcttcctgttcataaaagatggcaaatactatctgggcgtcgctgacagcaaatccaaaaatattttcgatctgaaaaaaaatccacacctgtgggataagtattcgttcgaaaacgccttttataaaataaaatataaacagataagcggcgctgctaaaatgctgcccaaaactttcctgccttccaaaggtaaaccgctgtctgaggaaaaaaaaaaaaaatatgggcatttagtgacggacagaattatagaaatacgtgataatggtctctatatgaagtcagcaggggatcgaaaggcagttatagaatggatcgattttatgaagtcagcaatcgccattcatccagagtggaacgagtattttaagtttcattttaaaaacactgaagaatatgcttcagcaaacgaattttacgaagatatggacaagcagacgtattccctggagaaagttaagataccagccgcatacgttgacgaacttgtgtcccagcacaaattgtacctgtttcaactgtataccaaagattttagcgataaaaagaaaaaaaagggaactgataatttacataccatgtattggaatggggtgttcagtgatgaaaatctcaaagccattgcggagggtacgaaaccgataattaagctgaatggtgaagccgaaatgttcatgcgcaatccatccattcctagaaaaattacccatgaacgcaacaaaccaatcgcgaataaaaacccattgaataacaaaaaagaaagcttattctcctatgatctcatcaaagataaacgatacactgaacgcaagttttattttcattgccctattactcttaatttccgagcagcgaaaccgacgaagtataatgaaaaaatcaaccgttttgtggaaaataatcccgacgtatgcattattggtattgatcgcggggaacgtcatttactgtattacacagtgattaatcaaacaggtgatatattagagcaaggctctttaaataaaatttcctcctcgtatacaaataacaagggggagaaggtcaacaaagaaacggactatcatgcgctgcttgatcgcaaagagaaaggaaagcatgcggctcagcaggcatgggagaccattgagaatattaaagagctgaaagcaggctatttatcacaggtagtatataaattgacacggttaatgctcaaatacaacgcggttatcgttctggaaaatctgaacgttggctttaagcgtggccgtaccaaagtagagaaacaggtttatcagaaatttgaaaaagctatgattgataaacttaattatctggtgtttaaggaacgcgggtatgaaatgaacggctcgtacgcgaaaggtctgcagcttactgacaaatttgagagctttgaaaaaatcgacatagataagcagacgggttgcatttattacgttatacaatcttacacctctcacattgatccgaagaccgggttcgttaatttattgaacagcaaattgaaatacgaaagcgtatcaaaagcccaggaaacaatccggaaattcgatcgtatttcctataatgctaaggcagattatttcgaattcagcttcgattacgggaaatttggtatcgacatgttccgcaatgagtgggttgtttgcacctgtggggattggcggtgggaatactcagcaaaggatcgcgaaactaaagcgtattgcgtaaccgatcgcctgaaggaattatttaaaagtcatggaatcgattatgtcggtggagaaaatattgttagcaagatcgcggatgtagcagacaaaagatttctgagtactctgctgttttatctccgattagtttttaaaatgcgttatactgtgagtggtacagataacgaaaacgattttatactgtctcctgtcgagtatgccccaggcaaattttttgattcacgcgaggctgcagctactgaaccgatgaatgccgatgcaaatggagcgtaccatatagctctgaaaggcttaatgacgatccgtggtatagagaatgggaaattgcataaattcggaaaggggggtgaaaaagccgcgtggtttaaatttatgcagaaccaggaatacaagaataatgggaaacgtccggcagcgactaagaaggcggggcaagctaagaagaaaaaggggtcgggtcctgctgccaagagggtcaagttggacggcagtggtcatcaccatcatcatcattaa

SEQ ID NO: 722 - DNA, 3789 bp, synthetic construct
  misc_feature 1..3789: note = Sequence codon optimized for human expression
  source 1..3789: mol_type = other DNA
atgaataacggaacaaacaactttcagaactttatcggcataagttctctccagaagactttgcggaacgctcttatccctaccgagacaacccagcaatttattgtgaaaaacgggatcatcaaagaggatgaattgcgcggagagaacaggcaaattctcaaagatattatggacgactattatcggggcttcatctctgagacattatcctccattgacgacatcgattggacttctcttttcgaaaagatggagatacagttaaagaatggcgataacaaggacaccctgattaaggagcaggccgaaaagaggaaggccatctacaagaagttcgcggatgacgaccgctttaagaacatgttctctgctaagctgatttctgatattctgccagagttcgtcatccataacaacaactactcagcctcagagaaagaagagaagacacaggttatcaaattgtttagccggtttgcgacgagcttcaaggactactttaaaaacagggctaattgctttagcgccgacgatatttccagctcttcatgtcatagaatcgtgaatgacaacgctgagatcttcttttccaacgccttagtgtaccggcgcatagtcaagaacctcagtaacgatgacattaacaagatatccggagatatgaaagattccctgaaggagatgtcattggagaaaatctattcctatgagaagtacggcgagttcatcactcaggaagggatcagtttttacaatgacatatgcggcaaggtcaactcctttatgaatttatactgccagaagaacaaagagaataaaaacttgtacaagctgcggaagcttcataagcaaattctctgcatagcggatacttcctacgaggtcccctataagtttgagtctgatgaagaagtgtatcaatcagttaacggttttctggacaacatttcatctaaacatattgttgagagactgcgtaaaattggggataattacaatggttataaccttgataaaatttacatcgtgagtaaattttacgagctcgtgtctcagaagacatatagagactgggagacaataaacaccgctctggagattcattacaacaacatcctgcctggtaatggaaagagcaaggccgataaggtcaagaaggctgtgaaaaacgatcttcagaagtcaatcaccgagatcaatgaattggtgagcaattacaaactgtgccctgacgataatatcaaggcggaaacctacatccatgagataagccacatccttaataacttcgaggcgcaggagctgaaatataaccctgaaattcatttggttgagagtgaactgaaagcctccgagctcaaaaatgtcctggacgtgatcatgaatgccttccactggtgttccgtctttatgaccgaagagctcgtggataaggataataatttctatgcagaactcgaagagatttacgatgagatttacccagtgattagtctttacaacctcgtgcgcaactatgtgactcagaagccctattccaccaagaaaataaagctgaattttggcattcccacgctggccgatggctggagtaaatccaaggagtatagcaataatgcgataatactgatgcgagacaatctttattatctcgggatcttcaatgccaaaaacaagccagacaaaaaaattatagagggcaacacgagtgagaacaagggagactacaaaaaaatgatctacaacctgttgcctggtccaaacaagatgattccaaaggtcttcctcagttctaaaacaggggttgagacctacaagccttctgcatatatactcgagggctacaagcagaataaacacctgaagtcctctaaggatttcgacattacattttgcagggacttgatcgattatttcaaaaattgcatcgctatacatcctgagtggaagaattttggctttgatttttccgacacatcaacatatgaagacatatcaggcttttacagggaagttgaactgcagggctacaaaatcgattggacatatatttccgagaaagacatcgacttattgcaagaaaagggtcagctgtatctcttccagatctacaacaaggatttctccaaaaagtccacgggcaatgataacctccacaccatgtacctcaagaatcttttcagcgaagaaaacctgaaggatatagtattgaaattgaatggcgaagccgaaatcttctttcggaaaagcagcataaagaatcccataatccataagaagggctcaatattggtgaacagaacatacgaggctgaagagaaggatcagttcggaaacatacagatcgtgcgaaaaaccattcctgagaatatttaccaggagctgtataagtacttcaacgacaaaagcgacaaggaattatccgacgaagccgccaagttgaagaatgtagttggtcaccatgaagcagcaactaacattgtgaaggactatcgctatacctacgacaagtactttcttcacatgccaatcacaattaactttaaagcaaataagacgtcttttattaacgacagaattctccaatatatcgccaaagaaaaggacctccatgtgattgggatcgaccgcggcgaacggaatcttatttatgtctcagttattgacacatgtggcaatatcgtggagcagaaatcattcaacatcgtgaacggctatgactaccagatcaaactgaagcagcaggaaggggcacggcagatcgcacgcaaggagtggaaagaaattggaaaaattaaagagatcaaggaaggctatctgagcctggtcatccacgagattagtaagatggtaatcaaatacaatgcaatcatcgctatggaagatttatcatatgggtttaaaaaaggaaggttcaaagttgagcgccaggtgtaccagaaatttgaaaccatgctcattaacaagctcaactatctggtgttcaaggacatctctatcaccgagaacgggggtttgttaaaagggtaccagcttacttacataccggaaaaactgaaaaacgtcggtcatcaatgcggttgcatcttttatgttcctgcagcatatacgagcaaaatagaccctactacagggtttgtgaatatttttaaattcaaggatttaacagttgatgccaagcgagagttcatcaagaaattcgattccatacgatatgactcagagaagaacctgttttgctttaccttcgactacaacaacttcatcactcagaatacagtgatgtccaaatccagttggtctgtttacacttacggcgttcgcattaaacgccgctttgtgaatggccggttcagcaatgagtccgataccattgacatcaccaaagatatggaaaaaacactcgagatgaccgatattaactggcgggacgggcacgatctccgccaagacatcatcgattatgagatagtgcaacatatttttgaaattttcagacttactgttcagatgcggaacagcctctcagagctcgaggacagagactatgatagactcatcagtcctgtgctgaatgagaacaacatcttctacgacagtgccaaagctggggacgcactccccaaagacgctgacgctaatggggcgtactgcatcgccttgaaaggactgtatgaaatcaagcaaattaccgagaattggaaggaggatggtaagtttagtagggataagctcaaaatctcaaacaaagactggtttgatttcatccagaataaaaggtacctt

SEQ ID NO: 723 - DNA, 3591 bp, synthetic construct
  misc_feature 1..3591: note = Sequence codon optimized for human expression
  source 1..3591: mol_type = other DNA
atgggagaggtaaagcttactaagttggctgaattttacgatgtgtatctcaaattccgcaaaaatcccaaggatgatgggctccagaagcagttaaaagatctccaggcagtgctcaggaaggagattgtgaagccaataggaaatggcgggaaatacaaagcaggatatgaccgtctgtttggggctaaacttttcaaagatggcaaggagttaggcgacctggccaagttcgtgatcgctcaggagggagagagttctccgaaacttgcgcatttagcgcattttgaaaagtttagtacttatttcaccggttttcacgacaatagaaagaatatgtacagtgatgaagacaagcatactgcaatcgcttacagactcattcatgagaacctccctcggttcattgacaacctgcaaatcctcgctacaataaagcagaaacacagtgccttatacgaccagattatcaacgaactgacagcttctgggctggatgttagtctggctagtcatctcgacgggtaccacaagctgctgactcaggagggaatcactgcatataacactctgctgggcggtatctctggcgaggccgggagtcgaaaaattcaagggatcaatgagctcatcaactcccaccataatcagcattgtcacaaatctgaaagaattgcgaagctcagacccctccataagcagatcctgtcagatgggatgggagtgtcatttctcccatctaaattcgccgacgattcagaagtgtgccaagccgtcaacgagttctatagacattacgccgacgtgttcgcgaaggtccagtcactgtttgacgggtttgacgactatcagaaggatggtatatacgtcgagtacaaaaacctcaatgaattatccaagcaggcttttggggacttcgccctgctcggccgcgtcttagatggatactacgtggacgtcgtgaatccggagtttaatgaacgctttgcaaaagcgaagaccgacaacgccaaggccaagttaacaaaagaaaaagacaagttcattaagggtgttcattctttagcttccctcgagcaggctatcgagcactacacagcccgacatgatgatgaaagcgttcaggctggaaaactggggcaatactttaaacacggtctcgccggagtggataaccccatccagaaaatccataacaaccatagtacaattaagggctttctcgagcgcgagagacctgccggggaaagagccctccctaaaatcaagagcgataaatctccagagatacggcagctgaaagaactcctcgacaacgctctgaatgtggcgcacttcgctaagttgctcaccaccaaaaccaccctccacaatcaggatggcaacttttacggtgaatttggagcactttacgacgagctcgccaagattgccacgctctataacaaagtcagggattacctgagtcagaagcctttctctacggagaaatataaattaaactttggaaatccaactctgctgaacgggtgggacctcaacaaggaaaaggacaacttcggagtgatccttcagaaggatggctgctactatctcgccctgctggataaggcacataagaaggtgtttgacaatgcccctaatactggtaagagcgtgtatcaaaagatgatttataagctgcttcctggccctaacaagatgctgccaaaggttttctttgctaagagtaatttagactattacaaccccagcgcagaactcctggataaatacgcccaaggtacacataagaagggggacaactttaatctgaaagattgccatgctctcatcgacttctttaaggcaggcattaacaagcatcccgaatggcagcacttcggtttcaagttctctcccacaagcagttaccaggatctgagcgacttttacagggaggtagaaccacaaggttaccaggttaaatttgtggatattaacgccgactacattaatgagctggtggaacagggccagctgtacctgttccagatttataataaggatttttctcccaaggctcatggaaaaccaaatctgcatactctgtactttaaggctttatttagcgaggacaacctcgtcaacccaatctataagctgaatggcgaagccgagatcttctatagaaaagccagcctggacatgaacgagactacaatccaccgggccggcgaggtcttagaaaacaagaacccggataaccccaagaaaaggcagtttgtgtatgacataataaaggataagcgttatactcaggacaagtttatgctgcatgtccctattacgatgaatttcggcgtgcaaggcatgactattaaagaatttaacaagaaggtgaaccagagtatccaacaatatgatgaggtcaacgttatcggaattgaccggggagagcggcaccttctgtatcttacagttattaacagtaagggagaaatcctcgagcagcggagcctgaacgacatcaccaccgcatccgcaaatgggacccagatgactaccccataccacaagatccttgacaaaagagagatcgaacgcctgaacgcaagggtgggctggggtgaaatcgagacaattaaagaactgaaaagtggctatctttcccacgtggttcaccaaatcagccagctgatgcttaagtacaacgctatagtggtccttgaggatctgaattttggctttaagagaggccgtttcaaggtggagaagcagatttaccaaaattttgaaaacgctcttatcaaaaaattaaaccacttagtcctgaaagacaaagcggatgacgagatagggagttacaaaaatgctctgcagttgactaacaactttaccgaccttaaatcaatcggcaagcaaactgggttcctcttctacgtcccagcctggaatacctccaagatcgaccccgagactggctttgtcgacctgctgaaaccccggtatgaaaacatcgcgcaatcccaggcattctttggcaagttcgacaaaatctgttataacgccgatcgaggttattttgaatttcatatcgactacgccaaatttaacgataaagctaagaactcacgccagatttggaagatatgcagtcacggcgacaaacggtatgtttacgataaaactgcaaaccagaacaagggcgcaaccatcggagtcaatgtgaacgatgaactcaaatctttgtttaccaggtatcatattaatgacaaacagccaaacctcgtaatggatatctgtcagaataacgataaggagtttcacaagtcattgatgtacttgctcaagaccctgctggcacttaggtatagcaacgcatcatccgatgaagacttcatcctctctcctgtggctaacgacgagggtgtgttttttaattctgccctggcagatgatacacagcctcagaatgccgacgccaacggcgcctatcacattgccctcaaaggcctttggctcctgaatgagttgaaaaatagcgatgatttaaacaaggttaaattagccatagataatcaaacatggctgaattttgctcagaaccgg

SEQ ID NO: 724 - DNA, 4101 bp, synthetic construct
  misc_feature 1..4101: note = Sequence codon optimized for human expression
  source 1..4101: mol_type = other DNA
atggagaagtctcttaatgacttcatcgggctttactctgtcagcaagacgctgagattcgagttgaagccagtgtctgagaccttggaaaatataaagaagtttcattttctggaggaggacaaaaagaaggccaatgattacaaagatgtcaagaaaataattgacaactaccataaatactttattgacgatgttctgaagaacgcatcatttaattggaagaagctcgaagaggccattcgcgaatataataagaataaatccgatgattctgcattggtggctgaacagaagaagctgggcgatgcaattctgaaactctttacttctgataaacgatacaaagcattaaccgctgccacccctaaagagttatttgagagcattctccccgattggtttggagagcagtgtaaccaggatttgaacaaggctgcgctcaaaaccttccagaagttcacatcttactttacaggatttcaagaaaacaggaagaatgtctactcagctgaagcaattcctaccgccgttccgtatcggatcgtgaatgataactttccgaagttcctccaaaatgtgctgatatttaaaaccattcaggagaagtgtccacagatcattgacgaggtggaaaaagagttgtcctcttatcttgggaaagagaagcttgccggaattttcacactcgagtctttcaataaatacctggggcaaggaggaaaggagaaccaaaggggtattgatttctataatcagattatcggtggggtggtggagaaagagggaggcattaacttacgtggggttaaccagttcctcaatctgtattggcaacagcaccccgactttaccaaggaagatcgacgcatcaagatggtcccactgtataagcaaattctgagtgacagatctagtctctcatttaagattgagtctattgaaaacgacgaggagttaaagaacgccctcctggagtgcgcggataagttagaacttaagaacgacgaaaaaaaatccatatttgaagaagtctgcgacttattcagttctgtgaaaaacttggatttgagcggtatctatattaacagaaaggatattaacagtgtctctagaatcctcacaggggactggtcttggttacaatcacgaatgaacgtctacgccgaggagaagttcacgaccaaagccgagaaggcgcgatggcagaagtcacttgacgatgagggggaaaacaaaagtaaagggttttacagcctgacggatctgaacgaagtcctggagtatagttcagagaacgttgccgaaaccgatatccgtattacagactattttgagcatagatgtcgttactatgtcgataaggagaccgaaatgttcgttcagggcagcgagctggttgccctgagtcttcaagaaatgtgtgacgacatcctcaaaaagcgtaaagcaatgaataccgtgctcgagaacctcagtagcgaaaacaagctcagggagaaaactgacgatgtcgcagttattaaagagtatctggacgccgtgcaggagcttctgcatcgtatcaagccactcaaggtcaatggcgttggagattccactttctacagcgtgtacgattccatctatagcgccctgagcgaggttatcagcgtttataataagacacgaaattacatcaccaagaaggccgcctcacctgagaaatacaagctgaacttcgacaacccaaccctggcagatggatgggacctgaacaaggaacaggccaacacttctgtgatcctgcgcaaggatggaatgttttatttaggtataatgaaccccaagaacaagccgaagttcgcagagaaatatgactgcgggaacgagtcatgttacgagaaaatgatttacaaacagttcgatgccacaaaacaaattcctaaatgtagcacacagaaaaaggaggtgcagaagtacttccttagcggcgctactgaaccctacatcctgaacgacaagaaatctttcaagtctgagctcataatcaccaaagatatttggtttatgaacaaccatgtgtgggatggagaaaagttcgtaccaaagcgagataacgaaacgcgccccaagaagtttcagattgggtactttaagcagaccggagacttcgatggctataagaatgcactgagcaactggattagtttctgcaagaatttcctccagtcctacctgtctgcaaccgtttacgactacaatttcaaaaacagtgaagagtacgaggggctggacgaattctacaactatctgaacgcaacatgttacaagttgaatttcattaacatccctgaaactgaaatcaacaaaatggtcagcgagggcaagctgtacctttttcaaatttacaacaaggacttcgcctctgggtccaccgggatgccaaatatgcacacactgtactggaaaaacctgttttccgacgaaaacctgaaaaacgtgtgtctgaagttaaatggtgaggccgagctgttttataggcccgcgggaattaaggaacccgtgattcacaaagaggggagctaccttgtgaacagaactaccgaggatggcgagagtattcccgagaaaatctattttgaaatctacaaaaacgccaatggcaagttagaaaagctgtcagatgaagctcaaaactacatctccaaccatgaagttgtgatcaagaaagccgggcacgagattattaaagatagacactatacggaacctaagtttcttttccacgttcccttaaccattaatttcaaagctagcgggaattcatacagcattaacgaaaatgttaggaaatttctgaagaacaatccggacgtgaacataatcggattggacagaggagagagacacctcatatatttaagcttgatcaaccagaagggggagattatcaaacagttcactttcaacgaggtcgaacgaaacaagaatggcagaacaataaaagtgaattatcacgaaaagctcgaccagcgggaaaaggaacgggatgctgccaggaagtcctggcaggccataggcaagattgcggaattaaaagaaggttatctgtcagctgtcattcaccagctgaccaagttgatggtggagtacaacgctgtggtcgtgatggaggatctgaacttcgggttcaagcgcgggagattccacgttgagaagcaggtctatcagaagttcgagcatatcctgattgacaagagcaattaccttgtctttaaggatagggggctcaacgagcctgggggagtgctcaacggttaccaaatcgccgggcagtttgagtctttccagaaacttggcaaacagtcaggcatgctcttttacgtcccagccggttataccagtaagatcgatcctaaaacgggtttcgttagtatgatgaattttaaagatctgactaacgttcataaaaaaagagatttcttttcaaaattcgataatattcattatgatgaagctaatggcagctttgtatttacattcgattataaaaaatttgatggcaaggcaaaggaggaaatgaagctgaccaagtggagtgtttacagccgggataaacgcatcgtgtattttgcaaagaccaagagctacgaagatgtcctgccaacggagaaactgcagaaaatctttgagagtaatgggattgattataaaagtggtaacaacatacaagatagcgtgatggcaattggcgcagaccttaaggagggggccaaacccagtaaagaaatctctgatttctgggacggactgctttccaacttcaaacttatccttcaaatgagaaattcaaacgcacgaacgggtgaggactacataatctcacctgttatggccgacgacggtacttttttcgacagtagggaagagtttaagaagggcgaagacgcgaaactccctttagatgcagacgcaaatggggcgtaccatatcgcactcaagggtttatccctgattaacaagattaatctttcaaaagacgaggagctcaagaagttcgatatgaaaatctccaatgccgactggtttaaattcgcccaagaaaaaaattacgcaaag

SEQ ID NO: 725 - DNA, 4032 bp, synthetic construct
  misc_feature 1..4032: note = Sequence codon optimized for human expression
  source 1..4032: mol_type = other DNA
atgaaaacgattgagaatttctgtgggcaaaagaatggatattctcgttcaatcacactccgcaatcgcctgattcccataggaaaaacagaagagaacattgagaagctccagttacttgacaacgacatcaaaaggtcaaaggcctatgtcgaggtaaagtcaatgatagatgattttcaccgagctttcattgaagaagtgctgtccaaagccaaactggagtggggacccctttatgacctgttcgatttgttccaaaatgagaaggataagcacaaaaagtctaaaatcaagaaagaactggagaccatccagggggtcatgcgcaagcaaatcgtaaagaagttcaaggacgacgatcgcttcgacaagttgtttaagaaagaaatattgactgaattcgtgccaaccgtgataaaggccgacgagagcggcaccatctctgataagcgagccgcccttgacgtatttaagggatttgccacctacttcactggcttccaccaaaaccgtcagaacatgtattctgaggaagccaaagcaacagccattagcaacagaattgtcaatgagaacttccctaagttctatgccaatgtgaaagtctttgagtgcctgcagaaggagtatccagccataatcacagagactgaagaagccctcagcgaaattttaaacgggaaaaaattagcggatattttttccgctgacggcttcaactcagtgttgtcacaaagcggcattgatttttacaacaccatcatcggcggcatcgcaggggaggcaggcacacagaaattacagggaataaatgaaaagatcaacctggcccgtcagcagctccccactgaggaaaagaataagttaaagcgaaagatgtcagtcctctacaaacaaatcctttccgacagaagtaccgccagcttcattcccattggatttgagagttctgacgaagtttacgagagtgtcaaacaattcaaagagcagagtctggataacgtgatctctgcggcaaaggaattgttcgagaagtcagactacgacctgagtcagatctatgtgcccgccaaagaggttaccgatttctccctgaaattgttcggcaactggagtattttacacgacggattatttttgatcgagaaagataattctaagaagacctttacagagaaacagattgaaaaccttagaaaagaaattgcgaaaactgattgcagcctcgcggacttgcagaatgcctacgaacgttgggcaaaagaaaacgacgtgaaggcagagaaaaccgtgaaaaactacttcaagattgccgagctgcgggccgacggtaagtccagggaaaaaacctctgtagagatcttgaataaaatagagtcaaccttcgagaagatagatttcgaaaagcgcgacaatctcatcaaagaaaaggaaaccgctacaccaatcaaagaattcctggacgaggtacaaaacctctaccactatctcaagctcgtcgactatagaggtgaggaacagaaggatactgacttttactccaaatacgatgagatcctgcagacactgagcgagatcgtccctctgtacaacaaagtgcgaaacttcgtcacgaaaaagccgaacgaggtgaaaaaagtgaaattgaatttcgacaatgtgagtctggctaagggctgggacgtgaataaagaaagcgattacacatgtattctgctccgtcggagtggcttgtactacctcggggttctcaacccaaaggacaagccaaagtttgatagcgagaacaacggagagacctctattaataaaaatgactgttacgagaaattagtctataaatacttcaaagatgtcacaacgatgatccccaagtgtagcacccaactgaatgatgtgaagcagcattttaagaactccaacgaggactacattctggaaaataacaacttcataaaaccccttgttatatctaagcgtatattcgatctgaataacaagacctttgacgagaaaaagatgttccagattgattactataggaatactggcgatctcaaagggtacacagaagccgtaaaagattggatatctttttgtatgactttcgtccactcatataaaagtacatgtatctatgacttctcctctttaggcgactgctcccagtttaagcaggtggaccaattttacaaggaaatcaatttactgctctataagatttggtttgtcaatgtgacagccgagaagataaactctctggttgacagcggtaaactgtttttattccagatctataacaaggattactctaccggcaaagacggagggaacgggagcaccgggaagaagaacctccataccatgtactgggagaacttattttctgaagagaacctccgggacgtttgcctgaagcttaacggagatgccgaacttttctggagggacgctaatcctgacgtgaaggatgtgtgtcataagaaggggtctgttctcgttaaccgaactacttctgacggagagacaatccccgaggagatataccaagaaatttacaagttcaaaaatccaaataagcaggaaaagtcctttaagctgtcagatacagctaaggaattactcgactcaggtaaggtcggcttcaaggaggcaaaatttgacataattaaggaccggcacttcacacagaagacctatttgttccactgtcccatcactatgaacttcaaagcacccgagatcaccggtaggaaattcaatgagaaggtgcaacaggtgcttaagaacaaccctgacgtgaaggttattggattggaccggggagaacgtcacctgatttacctgtccctcattaaccaaaagggggagattgaactccagaaaacactgaaccttgtggagcaagttcgaaacgacaagaccgtctcagtgaactatcaagagaaattggtgcaaaaagaaggcgagagaggaaaggcccggaaaaactggcagacaatttctaatataaaggagcttaaagagggttacctgagtaacatagttcacgagattgctaaactgatggtggaaaataatgcaatcgtggtaatggaagacctgaactttggtttcaagcgcggccggttcgctgtcgagcgccaggtctatcagaaatttgagaatatgctgattgaaaagctcaattacttggtgttcaaggataagaaagtcgcggagcctggcggtgttcttaatgcctaccaactcacagacaaggtcgccaacgtatctgatgtagggaagcagtgtgggtggatcttttacatcccggcagcatacacttctaaaatcgaccccaagaccggcttcgccaacctcttttacacagccggacttacgaacattgagaagaagaaagatttttttgataaatttgatagtatcagatatgataggaagacagactcctttgtgtttacgtttgattattccgacttcggagacaatgcggacttcaaaaagaagtgggagctgtactcaaggggggagcggctggttttcagcaaggctgagaaatctgttgtacatgtgaatccaacagaaaaccttaaagccttgtttgataagcaggggatcaactggagctccgaagacaatattatagaccagatacaggcggtgcaggctgagcgagaaaattgcgccttttacgacggactctaccggtcttttacagctatcttgcagatgcggaacagtgtgcccaacagttcaaaaggggaagacgattatttgatcagtccggtcatggccgaggacggctctttctacgacagccgagaagaagctgaaaagggaaagacaactgacggaaaatggatcagtaagcttcccgtggacgcagatgccaacggagcctatcatattgctctcaagggcctctacttgttgcagaacaatttcaatctgaatgaaaatgggtatatcgagaacattagcaatgcggattggtttaagtttgtccaggaaaaggagtacgcaaag

SEQ ID NO: 726 - DNA, 3921 bp, synthetic construct
  misc_feature 1..3921: note = Sequence codon optimized for human expression
  source 1..3921: mol_type = other DNA
atgtccatttaccaggaattcgtcaacaagtactctttatctaaaactctcaggttcgagcttatacctcagggaaaaactctcgaaaatatcaaggctaggggcctgattttggatgacgagaagcgtgcaaaagattacaagaaagccaagcaaattatcgacaagtaccaccaatttttcatcgaggaaatcttaagcagtgtctgtatctctgaagacctgttgcagaactacagtgatgtctactttaagctgaaaaagtccgatgatgataatctgcagaaggactttaagtctgccaaagataccatcaaaaagcagatatccaaatatatcaatgattcagagaagtttaaaaatctttttaatcaaaacctgattgacgccaaaaaaggccaggagtctgacctgattctctggctcaagcagtccaaggataatggaattgaactgttcaaagcaaacagcgacatcacggatattgatgaggcccttgagattataaagagtttcaaaggttggacaacttacttcaaggggttccatgagaatcgcaaaaatgtgtactcttctaacgatatccccacatctatcatctatcgcatcgtcgatgacaacctccccaagtttcttgagaataaggccaagtacgagtccctgaaggataaggctccggaagcgattaactacgaacagattaagaaagatctcgcagaggaactgacattcgatatcgattacaagacgagcgaagtgaatcaacgtgtctttagcctcgatgaggtgtttgagattgccaacttcaataactacctgaatcaatctgggatcacaaaatttaacacaattattgggggcaaatttgtcaacggcgagaataccaagcggaagggcataaatgagtacattaatctgtattcccaacagatcaacgacaagacactgaaaaagtataagatgagcgtgctgtttaaacagatcttgagcgacactgagtctaaatccttcgtcatcgacaaactcgaggatgactccgacgtcgttactacaatgcaatcattttacgagcagattgcagcattcaagacagttgaagaaaaatcaataaaagagaccctctctcttctgtttgacgaccttaaagctcagaagctggatctttcaaaaatttattttaagaatgacaaatccctgacagatctgtcacagcaagtgttcgacgactatagcgttatcggtacagctgtgctggagtatattacccagcaggtagccccgaagaacctggataaccctagtaagaaagaacaagatttgatcgcgaaaaaaactgagaaagccaagtacctgagtcttgaaactatcaagttggccctcgaggagttcaacaaacaccgcgacattgataagcagtgtcgtttcgaagagatactgtcaaacttcgctgcaatccccatgatctttgacgagattgcccagaacaaggataatctggcccagatctctatcaagtaccaaaaccagggcaaaaaagacctcttacaggcaagtgctgaagaggatgtcaaggccattaaagacttgttggatcagacgaataacctgttacaccggctgaagatcttccacattagccagagcgaggacaaagctaacattctggataaggacgagcacttttatcttgtttttgaggagtgttactttgaacttgcgaacattgtcccactctataataagattcggaactacattacacaaaaaccctactccgacgagaagtttaagcttaattttgagaactcaaccctcgccagtggctgggacaagaacaaagagtcagcaaatactgcaattctgttcatcaaggacgataagtattatctgggcataatggataagaagcacaataaaatcttttcagataaagccatagaagagaataagggggagggctacaaaaagatcgtgtataaacagatcgcggatgcatccaaagatatccaaaacctgatgattatagatgggaaaaccgtgtgcaagaagggcaggaaagatagaaacggcgtgaaccgccagctgctgtctctgaaaagaaagcaccttcccgagaatatttaccgaataaaggaaaccaagtcatatctgaagaatgaggccagattctcacgaaaggatctttatgacttcatagattattataaagacagattggactactatgacttcgagttcgaacttaaacccagtaacgagtactctgattttaacgactttacgaaccacattgggagtcagggctataagttaacgttcgagaacatctcacaagactacatcaactccctcgttaacgagggcaaactctacttattccaaatttacagcaaggattttagcgcttattcaaaaggtcgtcccaatctgcatacactttactggaaagctctgttcgatgaacggaatcttcaggacgttgtgtacaaactgaatggcgaagcggaacttttctaccggaagcagtctataccaaaaaaaatcacccacccggcaaaggaaactattgcaaataagaataaagacaaccccaaaaaggagtccgtctttgagtatgatctgataaaggataaaagattcactgaggacaagttcttcttccactgcccaatcactatcaatttcaagagctctggcgctaataagtttaacgacgaaatcaatcttttgttgaaggagaaggctaacgatgttcatattctgagcattgaccgcggagagcgtcacctggcttattacaccctggtggacggcaaagggaatattatcaaacaggacaactttaacattatcgggaacgaccggatgaaaactaattaccacgataaactggcagcaatcgaaaaagaccgagatagcgcaagaaaggattggaaaaaaatcaacaatatcaaagagatgaaagaggggtatctgtcccaagtcgttcacgagatcgcgaaactggtaattgagtataacgctatcgtggtctttgaggatctcaactttggtttcaagaggggtcggtttaaagtggaaaaacaggtgtatcagaagctggagaaaatgctgattgaaaagcttaactatctggttttcaaggataacgagtttgacaagaccgggggggtgttgcgagcctatcaactgactgctccattcgagacatttaagaaaatgggaaagcagaccggaattatatattatgtacctgccggcttcacttcaaaaatctgccccgtcacgggatttgtgaatcagttgtaccctaagtacgaaagcgtgagtaagagccaggaattttttagtaagttcgacaaaatttgttacaacctggacaaaggatacttcgagttttccttcgactacaagaacttcggcgacaaggctgccaagggcaaatggactattgcctcattcggatcccgcctcatcaactttcgcaattccgacaagaatcacaactgggatacgagagaggtttatccaactaaggaactcgagaagctgcttaaggattactctatcgaatacggacacggggaatgcattaaggctgccatatgtggggagtccgataagaaattctttgcaaaattaaccagtgtgctgaatacaattctccaaatgcgcaattctaagaccggaactgagctcgattacctcatcagtcctgtggccgatgtgaacggtaatttcttcgacagtcggcaagctccaaaaaacatgcctcaggatgcagacgcgaatggggcctaccatatcggacttaaggggctgatgctgttggatagaattaagaataatcaagagggcaagaagctcaacctggtcattaagaacgaagaatatttcgagttcgtgcagaacagaaacaac

SEQ ID NO: 727 - DNA, 3939 bp, synthetic construct
  misc_feature 1..3939: note = Sequence codon optimized for human expression
  source 1..3939: mol_type = other DNA
atgaaagccgaaactaatctcactgagctggtcaatctgtacagcctgcagaaaaccctccgttttgagcttattccacagggggagaccctgcaaaacattgaaaagatgggaatactgacccaagacaatcagagaacagatgactatgagaaggtaaagactatcattgatgagtatcacaaacgcttcatcgaaatttgcttcaaagattttgtcttagaagatctggataagtaccaggaactttatataaccaagaataggtctgaacaggaaaatactgagttccagaaactcaagaccaacttacggaagcaagttgtcaacagattcaaggagaacgacaaacttaaaaggctttttagtaaggagttcattaaggaggatctggtcgagtaccttgatggccgggatgaggacaagaccagggtggaaaggtttaaggactttacaacttactttactggattctttgaaaatcgaaaaaacatgtactccgatggtgagcaaagcacagccatagcctacaggctcattcacgagaacctgcctaaattcatagacaatttgagcatcttcaacaagattgttgagcgcaacgaaattaaaaccaaattctctacgattgttaacgacctgaactgtcatctccatagcccaattaacagtatcgaggaagtgttcactattgattattttaacaagaccctcagtcagaagcagatagaggactacaacacaataatagggggggttagtaaaaacaatgagaaggttcaggggctcaatgaatatatcaacctgtataatcagcaacaaaaagacaagagcaaccggctgccccttctgaaaaagctgttcaaacagatcttgtcagatcgcgagcctatatcatggctccccgaagagctgtcctcagataaagatatggcgaacagcgtgttgaatctctacaaggaggtctacgagattatttattcaaatgacaattcactttacaatctgataacctacattgacaactatgacctttctaagatctacatctcaaacgaccagagccttaccactctgtcacagcgtatttataaccgctatgacatctatacattcgccataaaacagacgcttaaggagctgaacaggcagaaaaggaaagagaatatcgaaaagtacgaagctcggatcgataacttgtttgagaactgcgagtcttttagtatcgaggaactcaacaatattgttaagaatacatacaaggaaaacgaggagattgatacgtccaaaactatcgagcagtatttcaaagactttggcgccattaacaaagaacatattcagaaagaaaatttaattttgcagctggaaaacgcctttacggtggcaaagcccatacttgaggccatcgacgacaacaacaagggcatatctcaggataaagacgctgtcgataagataaaaaacctcctggacgttctcaaggacatccagcacttcgtcaagcccttactgggatccaacatcgaggccgacaaggacgaaaacttctatgggtccttctcagatatctatcagcgcctcgataaaattaccccgatatacaacatggtgcgaaattacctgacaaaaaagccgtactctgaagagaaaatcaaactcaattttgagaaaggaaatcttctgaacggctggattgattcttacaccgaaaagtctgataacggaacgcagtactctggctatctgtttagaaagctgaactccatcggagagtatgattactatctcgggatttccttggacacgaaactcttccgtaacactgacaacgtcgaagaaaacgacaaatcagaatttgagagactggattattaccagctcaagagtcagacatttttcggcaactcctataaaggcaaacagacatataataaggacaaagaagacatgataaccatcattgacgattttatagagcgcctgccaaatatccatcctctgaaagaacgatccaaaaataaacctgacacgtttacaccaaaccagtatcttacatacttcaaaaactaccaagaagagtacaactgcctgctgaaggacaaaaaattcaaaaataaaaacgaagaactgataaaaaatattattgagacaataaaatctatcaatcggctgccgaaggataagattaaagccattatttcaaagaactacaccgtgttctccgagataatcagcgatatccaggataccctgctgaaggaaaagatcttcaattatatctccgtgtctaagaaggcaatggaagccgcagctaagcgggagcaaaaaactctgtacctctttaaaatttctaacaaggacttgagttatgcggacacccattccaagggggatcgtaaatctcgcgggacagaaaatctgcatacgatctactttaaaacactcatgtccggcgagcaaaacgtgctggacatcggcgcaggagccatattctaccgtaagaaaactgaatggctcaaatcttcccccactcacaaggcaaatgaaaagattcagaataaaaactctcacaccaagtctgaattcgagtatggacttatcaaggacaaaaggtacattgaaaacaaatttctgttccatttgagcttgacccttaactaccagtccaaagggatcaagaacattaaccctatcgtcaacaacatgattcgcaataaagagatcaagcatatcattggcatagaccggggagaacgaaatcttctttacctttctctgatagatctgaaagggaacattgtcaagcagatgtcattgaatgagataatcaacgagtacaatggcaacaagtacaaaacggattaccatgatctccttgctaagaaagaggaggaaagaaagaaggctagattgagctggggaacaatcgagaatataaaggagctcaaggacggatatatatctcaggttgttcatattatatctcagatgatcgtaaagtataacgcaatagttgtacttgaggacttgaatttcggattcatgcgaggtcgccagaagatcgaaaaacaggtctatcagaagttcgagaagaaactcatcgataagttaaactattacgtggataaacagaaaaactcaaatgagataggtggcctttttcatgccctccagctcaccaataaattcgagagctttaaggacatggagaagcagaacggttgcctgttctatattccagcgtggaatacttccaaaatcgacccagtcaccggtttcgttaacatgtttgataccagctactgttctgtgaaagagagcaaggtgttcttcagcaagttcgatactatcaggtacaatgctaaagatgacttgtttgagtttgccttcgattacgataattttactacaaaagctcaggggaccaagacacaatggacactgtgtagttttggacagagaatcgagatttttcgaaacaaggaaaaaaacaacacctgggacaacaaagaaatcaacatcaatgatgaatttaagcagctgtttaatgagtttaatatcgatattaacatcaatgataacctgaagcaggaaattcagaaacagacctccgctgagttttttaagcgaattatgcacctgatgaagctgcttctgcagatacggaacagcatcacaggaagtacggagaagaatgatgattacattatcagcccagtagctgacgagaacggagtgttttttgattcccgtaaagtgaacgaacctgacaacctgcccatcgacgcggacgccaatggggcttataacatcgcccggaagggtttgtgggtagtaagacagatccagaacaccaaggacgaagacaagatcaatttggccatcagtaacaaggggtggttgaacttcgtgcagcagaagctgtatcttaacgac

SEQ ID NO: 728 - DNA, 3429 bp, synthetic construct
  misc_feature 1..3429: note = Sequence codon optimized for human expression
  source 1..3429: mol_type = other DNA
atgacaaacctgtaccctatagagaaaactgtatgtttcgagcttcgccccattggcaacactctggaacacttctataaaaacgagattatcgagaaggctcagaaccgatccgacgagtttcgcgagataaagcatttaattgatcccatacacaaagagattatagaagaatgcttccaggaactctcagaaaactccgagttcacacgcctcctggaaaaatacgaatttaagccccacgtaattaattcaaaaaagcccctgccccgagataagaagctgatagaggaaaacatctacaacaagaaggagattgtagagatcgtgaaggacaccttcagacacaaccccaaatacaaactgatcttctccgacaagaagatcgatatgctgaaggaatactacaaagacgactgcgagaaatttgaactgatctcccactttgaggaatttgccagctatttcgagaagtacgatataaagctgaagaatatttacggctgtgaggggaaaatctccaatacctgtaagtctatcctcaatagactgattacagacaacctccctatattttatttcaatactaagaaaaatattctcaccaaagttaagttcagtgcctccttcgagaacgtgaagtacatagacaaattcgcttcttacttctccattagcggcattgagaagtataacaagatcatcggcaatattaatgacgcggtgaataagctgaaccagaaaggtaaaaaatatagctacctcgggaagatgaaagacatctttgaccttgaccagtacagcgacatcgtaaagaagataagtgatgacaaagagctggtggagattatcaatatcttcatagacggacaggacatcgaagaactgaagaacaccttcagtaatctgaatgacaaatacaacctgaaaaagatcttcgttaggcgcgggaaagagcttgacgatttgctgaagcgaattgactttaagggcagggcacgcttgacaaccagctacgttaacctcttctacatcgatagcattaacaggaacaaggtcaagatctacgaggcaatctctgtaaagataaatgaattggttgacgactacatcaagaaatatgaggacgtaaaatacattttgaccgctaaatacgactccgggactaagattctggggcaaaatgacaaaaatatcgctaagattaaggagcttctcgagagcataaaggctatttacgatttcgtgagtatattcataccaaagaaggccgagaaccgggataacatagattacgaaaaagtgaatttcgatatttacaacaaaatcaactttgaacgactgtccattatcaaccagattttcaaccatttcaaggactacttcaccttaaaaaattttagcaccaagaaaattagattgaacttcaacgtggagcagttactgaacacgtgggatatcgataaaatcgacgaaacccttggcaccatcctcttgaaggaggaggaggagaagaccaagtattacctcggtatcttaaactcatctaactattctaaattcgagtatacagatgtcaaagagaacaattataggcagatgatctatacaagccagtctgaagaggagaaaaataaaaattataaaatctcattcaaatacatcaattctgcaaagattgatgaaatggtggaaaaggatgagatgtacctgttccagatctataataaggacttttccagctactccaatggaaactacaagctgaatacgatgtattggaacaacatcttcgattctaacaatatagaaaacattatcttcaacatcgctgggggggccacgatctttttccgagctaagtccttagaacgaagagagacgcacaagcagggcgaagtgctgagcaataaaaacaaggataaccagaagaccacctccatcttttcatacccactgataaagaataagcggtatactgaggataagatcaagcttcacgttcccatcgagatcaattgtaatagtaagaatcttaaccaacgcaagctgaactaccgcgtaaataaaaacatccagaatcttaaagaggtgaatataattggtatctcacggggaactaatgatctcctttatgccactgttatcaactctaaaggggagatcatcgagcagacatctctcggaaagattaagaacgtggtctttgataaaagtatcaacgcgacacgggagatcattagtgactataataaaataatagatacaaaggaaaaagaaagggagaatgccaataataggaacaagaccggcgaagaattaaaccttgagaagagcatcaaggatattaagaatggctacataagtcaggctgtgaatgtcattgcaaacctggtgaaaaaatacaatgcaattattgtgttcgaagacctcaatgataagaagtccgagaagattgagtcaaagattgagaagtccatctatcgaaatatccagaatgcagtcattactaaattgtcctatctggtcgataaaaaaaagaaagacaagttcgccgagggctccatcctcaatggataccagttgacctactactgcgagcaagatctggtcgagaagcaggaggactctgaagaaaagcaaaatggcatcgtcttctatgtgagtacatacatgacgaccaacatagatcccaaaacaggctttgttaactgtttcagcgtctctttacctaaatctatcgatggagtcaaagattttcttgaaaaatttaaggagattaagtttaatacaaaagaggggtattacgagtttgtcgtgaattacgaaaatatttccaagtacacacgctactttattggagaaaagctttcaaagaaagagtgggtgatctgttcttatggggatagaatcgaagaaagcaaagatattaatacaggtaaaaccaaatacaaaaagatcgatttaactaaggagttcaagtgtctgttcgagaagttcaatattgggcagggtaaaaagcttaagacaaatatcataaagtttctggaaaaccttgatctgggtagcggcctgcaagctaaaataaagggtaccaatcgtttcattaataagcagagcattcaacaggaagagttctgtcgggagttcatgcgactgtttgcactcatcttaaagctccagaacagcgatgggaaggaatcctatattattagtcctgtgaaagacagcgatggcaaattcttcgacagtcgcaagcataacgagtactcttcaatcgtgccagagaacgaaattagcaattcagcctataatatcgcacgaaagggtctgctgataatcaaccgtattaagaagacaaaggagcttgaaaggatagacctcaatttacgagatgagtactggctgaactttgtccagaataacaat

SEQ ID NO: 729 - DNA, 3888 bp, synthetic construct
  misc_feature 1..3888: note = Sequence codon optimized for human expression
  source 1..3888: mol_type = other DNA
atgaaaggcgcgaaaatggggtacgaaaattttatcaataaaaattcttgtgttaaaacgctggttaatgagctgagacccaccgagtggacccgcaagcacattgaggaggacgccattctgagtgccgacgaactgagggccgaggaatccgacaaactgaagtctattatggacgattactatcgccgctatatttatactaaactctctggtgtgagttctctggattgggatgaattgttcagcattatggaggtagcctacaaaagtggtaagaaggataagaattgtaaggcccagttagaaaaggtgcaggaggaaatgcgcggcaagttctataacgtcctgtccgacgatgatatcttcaaaatgatgttcagcggtaagtttgtgacaaaggtgctcccagaattcgtccgaaataacaaagaatactcagctgaggagaagcaacaaaagttggacacactgaagctgttcaaggggttcactacctctctggtgccatttttcaacaaccgcgaaaatatctttagcaaaaagcctatccactcctccatctgtcaccggacggtggatgagaacaccgccatcttttatcagaatattatctcctacaagaatattgaggataacgctccacaggaaatagaaaagatcgagcaccaggggaggcaacagctcgacgagtggaagctgccggatatttactcctattcattttataataatgttttgacacaacagggcatagaattctataatgacatttgcgggattgtcaacagccacatgaatctgtattgtcaacagacaaaagagaaatcaggtcagtaccggatgcggaagctctacaagcaaattctctctattagtagtacgagttatgaagtgccttacaagtacgaagacgacgctcaggtgtactcttccatcaacgaatttgttgaccggatttttaattccaatttttccgcaaaagtcgaaaaaatgctggggaaggcggaggaatatgattttgataaaatctacatctcttctaaaaactatagcagcatcagcaacttcatctctggcaaatggaatactctcgacgattgcattcggcgctattacgaggacaacactgttgggaatggagataaaaaggagaaaaaggtggaggagaaagtgaaaaaagatagttttcgcagtttggacagcattgataaggtcgtcgagatgtatgagaaacgagggaagtctgctaaagagtacatttaccagattagggagatttactctgacaataagctctataaatttggacaggatgggtccgatacggtgaaactgatcgaaaacgacgctaagatcgaacgcatcaaatgtgtattggacatgctgctcaacacaaaccgatttctggatacctttgctgtcggcgacggtgaggccgtggacgtaggcttctacagcgagatagatgaactgaaggagatcatcgacgggattgaaccactttacaaccgggtgcgaaattacgtgacgagaaagccctataacaaaaataagattaaactgaactttaactcccctaccttggctgaggggtggtctaagagcaaggaatatgacgataatgccataatcctgagaagagacggcaagtattacctgggcatctttaatgttaaaaacaagcctgacaagaaaataatggagggttacagtggcgatgtgggagacggctatgagaagatggtgtatagcttattaagcaacattcattctaactttcctagaatcttcattaaatctgacgagtgtgaaaagaagtataagttgtcacagtatattatcgatggctacgacaacgaccgccacatcaagagctccaaaaacttcgatataaagttttgtcacgacctgatcgactattttaaggcttcaatcaatgcaaatcctgactggaaagtgtttgacttcaaattctcagatactaaaagctatgaagacatatctggcttttatagtgaagtagaaaagcagggttataagatcagttgggtaaacatttctaaagaggatattgatagattagatgaaaccggccagatatacctcttccagatatacaacaaggacttttcagagagcagcatgggaacacctaacctgcacacgctgtatttcaaaaatctcttcagtgaagaaaatatacgagaaacagttctgaagctttccggcaaaggcgagctgttcttccgcaaggcctctatcgacaaaccatctggacataggaagggatctatactggtcaacaaaacttataaaaccaatatcggaaacgaagaggtacgagtcccaatcccagacaaggagtacatggagatctatacctacttgaacaacggaagaacaacaaagctttccgaaaacgctcagtcactgctggacaacaaactcgtggagtatttcgaagcggagaaagagatcattaaagatcgtagatatacagtggacaaattttttattcacacgagcgttgtgatcaattataatgctgaaggggcttctgcgaagcagctcaacgagcaggtgctcgattacatttcaaagcaagatgatatgcacattatcggaatcgatagaggtgaaaggaacctcgtgtacgtgagtgtcatcgacatgaaggggcgaattgttgagcaaaaaagctataacgtggtaaattcctattcctatcaaaagaagcttgtggagcgcgagaaggcccgggacgaggcgaggaagtcttggaaggaagttggaagaatcaaggatttaaaggatggctacctgagcctggtggtgcacgagatcgctgatatggtgattaaatacaatgctatcatagccatggaggatctcaattatggattcaagagggggcgcttcaagattgagcgtcaagtgtatcagaagtttgagagcatgctgattagtaagctgtcatatctggttgataaaaccaaaaaggtagatgagcccggaggtgtcctgaaagggtaccagctggcgtttgtgccaaaggaggtaaagaaagttgggcgccaatgtggcatcatcttctatgtgccgcccgcttatacgagcaaaatagacccagcaacagggtttgtagacatgtttaagttcaaatccggggaaaaggaaggaacggctagagccgacaatgaccgtaaagagtttttgtcaaagttcgattgcattagatacgtcgagaaaaacgacaacagagaggaaatgttcgctttcaccttcgactacgataacttcgcgatgcacaacacagtgatcgcaaagaagaagtggaccgcatacacttttggatctcgaattcagaaagtttatgagaacggacgctacacctcttcaaccagagaaatacagctgacagacaagatgaaacgcctgcttaatgagaacaacatagaatatggggatggtcacaacttggtcgatgatatcagaacgttagacgtcgattcatctggcgccgtcatcaatgagattttcaaaatattccggctgaccgtgcaacttagaaattcaaaatcagaagcagagaatgagaagaatggggagtacgatcgaatcatcagccccatcatgaatgatgccggcgagttttttgacagctttaagtataagaagatgaatgaagaaactgaacctggtaaacacaatgccactatgccgatcgacgctgacgctaatggcgcctactgtattgctatgaaatgtctctatgaggccaaaaacataaagagcggttgggaaaaggagggaaaaaaaaataacgaccttttatgtgtgacaaacgctgactggtttgactttatgcagaacaagcgttacgtg

SEQ ID NO: 730 - DNA, 3756 bp, synthetic construct
  misc_feature 1..3756: note = Sequence codon optimized for human expression
  source 1..3756: mol_type = other DNA
atgaataacctgaagcagttcatcggcatctacccagtaagcaagactctcagattcgaactcaggcccattggcaaaacacaggagtggatcgaaatcaataaagtacttgaaggtgacgtgcagaaggctgccgattatccgactgtgaaaaagctgatcgacgagtaccacaaaatctgtatccacgactctctgaaaaacgtgcattttgattgggcacctctcaaagaggccattgtcatcttccagaaaacaaagagcgatgagtctaagaagagactcgaggccgagcagacgattatgcgcaaacaaatcgccgccgcgattaaggatttcaagcacttcaaagagctgacagccgcaaccccttcagacctgataacatccgtgctgccagaattttctgacgacgacagtctgatgagctttagaggatttgctacctacttcagtggatttcaggaaaatagaattaacatttactcacaggaatcaataagtactggcgtcccgtaccgtattgtccacgacaattttcccaaattcttgtccaaccaggaggtctacgatcgaatcagatccgtatgtcctgaagtaatcaagcaggcctcagaggagcttcagccttttctggaaggggttatgatcgatgatatcttctccttggatttttataactccctcctgacacaagatggcatcgacttttataatcgggtcattggcggagtctccgaagaggggaagcagaagtacagaggtattaatgagttttcaaacttgtaccgtcagcagcacaaggacctggctgcatccaaaaaggccatgacaatgatccccctgtttaagcagatcctcagtgatagggaaacgttaagctatatccctgtgcaaatcgagtctgaggatgagttagtgtccagcataaaacagttctacgagcatataactcactttgaacgcgatggtaaaaccgtgaatgtcctgtctgaactggtggctgtcctgggaaacatcgacagttacaatcctgacggaatttgcatctccgctagcaagttaacggacatctcccaaaaagtatatggtaaatggtccattatagaggagaagctgaaggagaaggccatcatgcagtatggtgatataagtgtcgcaaagaacaaaaagaaagtggacgcctacctgagtaggaaggcctactgtttgtccgatctgtgcttcgacgaggtggtgtctttcagtcggtattattcagagctgccacaaatgttaaatgccatcaatggctattggatgcagttcaacgaatggtgtcgctccgacgaaaaacagaagttcctgaataatcctatgggcaccgaggtcgtcaaatgccttctcgatgcgatgatggagctgtaccataaatctgccgttttggtgatgccggaggaatatgaagtcgacaaatcattctacaacgagtttattcctctctatgaggagctggatacgctgttcttattgtacaataaggttcgcaattatcttacccggaaaccatctgacgttaagaagtttaaactgaactttgaaagcccaagtctggcctctggatgggaccagaacaaggaaatgaaaaataatgccatcttactgttcaaagacggtaagagttaccttggagttttgaacgcaaagaataaggcaaagatcaaggacgccaagggagatgctagcagcagcagctacaaaaaaatgatctacaagcttctgtccgatcctagcaaagatttaccgcacaaactctttgccaagggtaatctcgatttttataaacctagcgagtatattttggagggacgggagttggggaagtacaagaagggtccaaactttgataagaagtttttgcacgacttcatagatttctacaaagccgctattgccatagaccctgactggagcaaattcaactttcagtacagcccgacggagagttatgaggatattggcgcttttttttctgaaatcaaaaagcaagcttataaaatccgctttactgatataaccgaatcacaggttaacgaatgggtggataatgggcagctttatctgtttcagctctacaataaggactatgctgagggagctcacggacgcaaaaacctgcatacattgtactgggaaaacctcttcaccgacgaaaatttgagcaacctggtgctcaagttgaatgggcaggccgagcttttctgccgtccccagagcatcaagaaaccagtcagtcacaagatcgggagcaagatgctcaatagaagggacaagtccggaatgccgattccagagaacatctatcggagtctgtaccagttctataacggcaagaaaaaagagagtgagttgacaaccgctgagaaacagtatatggatcaggtaattgtgaaagatgtaacgcatgaaataataaaggaccgccggtacacccgtcaggagtatttttttcatgtgcccctgactttgaacgccaacgctgatgggaatgagtacatcaatgagcaggtgctcaactatttgaaatataacccagatgtgaacatcatcggcattgaccgaggtgagcgtcatttgatttacctgactctcattaaccaaaggggcgagattatcaaacaaaaaactttcaacattgtcaataattataactaccaggtgaagctggagcagcgggagaaggagagggacgaggcacgtaagagctgggattctgtgggcaagatcaaagacctgaaggagggctttttaagcgcggtgatccacgaaatcaccaagatgatgatcgaaaacaacgccatcgtggtattagaagatctcaattttggtttcaagcggggcagatttaaagtagaaagacaggtgtaccagaaattcgagaagatgttaatcgataagcttaattacctctcatttaaggaccgtgaggttggcgaagaaggcggaatcttacgcggttaccagatggcacagaagtttgtcagttttcaaaggctcgggaagcaaagcggcttcttattctacattccagctgcctatacaagtaagatcgaccccgttaccggattcgtgaatcacttcaattttaatgacataaccaacgctgaaaagaggaaggatttcttgatgaagatggagcggatcgaaatgaagaatggatacattgagtttacgttcgactatagaaaattcaagacctatcagaccgattaccagaatgtgtggactgtatccacattcggcaaacgtatagttatgcggattgatgaaaagggctacaaaaaaatggtggattatgagcccactaacgacattatctacgccttcaagaataaagggattttgctgtccgagggttccgacctgaaggcactgatagccgatgtcgaggctaacgctactaacgctggattcttcggaactctgctgtacgctttccagaaaaccctgcagatgcggaattccaatgctctgaccgaggaggacttcatcctgtcccccgtagcaaaagatgggcatcatttctgttctaccgatgaggccaataaagggcgagatgctcagggtaactgggtaagtaggctgcccgttgacgcggacgcaaatggagcatatcatatagccctgaaaggtctctatttgctcagaaatcccgaaaccaaaaagatagaaaatgagaagtggtttcagtttatggtggagaagccatatctggaa

SEQ ID NO: 731 - DNA, 3777 bp, synthetic construct
  misc_feature 1..3777: note = Sequence codon optimized for human expression
  source 1..3777: mol_type = other DNA
atggaatccaacaataaaatcttcactgagacaattggcacctccagcattgccaagaccatgcggaattctctggtccccactgagagtactaaacgtaatatcgaaaagaatggtataattatcgacgatcaacttcgagccgagaagcgtcagcagctcaaggaaatcatggatgagtactatagaacctacatcgacaataagctgtctaatgtggctctcacacggacaattgattggaaagagctgttccaagctatcgaggataattacaagcagaatactaccaagaccaaaaacgagctcgaaaagaagcagaaagagaaacggaccgagatatataagatactcagcgacgacgagaaatttaagcagctctttaatgctaagctgctgacgaacgtgctgccagagttcattaaaaaccagaatattgataatgaggaaaaacaggaaaagatcagcacggtcgaattgtttcagaggtttaccagcagttttacagacttcttcaagaacagaaaaaatgtgttcagtaaagacgaaatttccacatctatttgctatcgagttgtgcaagaaaatgcttggatcttctatcagaacctcttggccttcgaagaaatcaagaaaactgcggagcaggagatcgagaagatcgaagcagaaaatagggattcaatcagcgattattctttgaaggaaatctttgacttcgacttttatgggctcctgcttaatcagggtggaattcgcttctataatgacgtgtgcggcaagattaattaccacatgaacttatatggccagaagcacaatatcaaatctaacaaatttaagatgaaacgcatgcacaagcagatcctctctatagacgagtcaactttcgaagtcccaacaatgttcgagaatgataaggaggtttaccaggttctgaatgaatttctgagcgatctcgcctccaaaaaaatactggaacgggttgagaaaataggagagaatgtcagcgagtacgagataaacaaaatctacattcagagcaaaaattttgaaaagttctccagttttatgtgtggcaattggcagataatcaacgattcactgaagacctactataacgaaaaaatcaaatctaagggcaaagctaaagaggagaaggttaaaaaggccatcaaggcaatcgagtacaagtccttggccgacatcaaccaactggttgagaggtataacaatgacgagcttaatcgcaaggccgaagagtacatctcagcaattaatgaaaagatcaaagatttagacgttaatgagattgaatacgatgagaagataaatttgattgagaatgagacaaagagtgaagaaattaagtccaagttggacagcattatggagattatgcactggactaaaatgttcattatcgaagaagagatcgaaaaggatgttaatttctataacgaaatcgaagaaatttacgacgaactgcagcctcttgtaactatctataacagaattaggaactatgtcacccagaagccttactctgaggagaaaataaagctcaatttcggcattcccactcttgcaaacggctggagcaaaacgaaggagtacgacaataatgccatcatcatgataagggatggcaagtactacttgggcatatttaacgctaagaacaagcctgacaagaaaataatggaagggcaccagagcgaagaaaatggggattataagaaaatgatctatcggttgttaccggggcctaacaagatgctgcccaaggtgtttatgtctaagaccggaatagcagagtataagcctagccagtacattcttgagtgctatgagcagaataagcatataaagagtgataaaaacttcgatatcaagttttgtcgggaccttatcgattttttcaagacaagtattaatcgccaccctgagtggagcaagttcaactttaaatttagcgagaccagcgaatacgaagacatttcaaccttctacagggaagtggagaagcagggatataaaattgagtggacctacatcagcgagaaggagatcaaagagctggacgagaatgggcaactctatctgtttcagatctacaataaggacttttcagagaaatcaaaaggtaaagagaacctgcacaccatgtatttgaaaaacttgttttctgaggagaatctgaaaaacatagtacttaaactgaacggggaagccgaggttttcttccgcaaaagtagtattaagaagcccatcatacacaagaagggttctgtactcgtgaataagacgtacaacgagaacggggaacggaaaagtatccctgaggaacagtacacggaaatctacaaatatctgaactccatcggcacaaacgagctctcagaaaaatccaagaaacttatggaagaggggaaagtggagtattacaaggccaattacgacattgtaaaggattataggtatagtgtagacaaattcttcatccacttgccaatgaccatcaacttcaaggcggcaggcttctctcccatcaacaacattgccttaaaaaatattgctctgaaggatgacatgcacattataggcattgatcgcggcgagagaaatctgatatatgtgtccgtgatcgacacaaaggggaatattgttgaacagaggaactttaacattgtaaacggaatagactacaaagagaagcttaaacagaaagaactggacagggacaacgcaagaaagaactggaaagagatcggaaagattaaggacctgaaggaaggatacctctccctggtggtgcacgaaatagctaaactggtggtgaagtataacgccattatcactatggaggatctgaatcagggattcaagcgaggccggttcaaagtcgagagacaggtctaccagaaattcgaaaccatgttaataaataagttaaactatttagtggacaaggacctcgccgtggaccaggagggtggcttactgagaggctaccaactcacctacattcccgagagcctgaaagtgctcggacgtcagtgtggatacatcttttacgtccctgccgcctatacctccaaaatcgaccctactaccgggtttgtggccattttcaactataaaggcatgaccgacaaggattttgtgacttcctttgatagcatcaagtatgacgacgaaaggggactcttcgcatttgaattcgattacgaaaattttgtcacacacaaagtggagatggctcgcaataagtggacagtctatacctacggtgaacggatcaaacgcaagtttaaaaatgggtcctgggataccgcagagaaggtggacctgacgtaccaaatgaggagcatattagaaaagtatgagattgagtacaataagggtcaggacatactggagcaaattgaggaactggacgagaaggcacagaacggcatctgtaaagagatcaagtacctcgtgaaagatattgttcagatgagaaattctctgcccgataacgccgccgaagattacgacgcaatcatttccccggttataaacaacaacggcgagtttttcgactctacgcgcggggatgaagacaagccactggatgctgatgccaacggtgcctactgtatcgccctcaagggcctttatgaggtgatgcaaatcaaaaaaaactggaatgaagagacggagttccctaggaaggagctgaagatacggcatcaggactggtttgatttcatccagaacaagaggtattta

SEQ ID NO: 732 - DNA, 3777 bp, synthetic construct
  misc_feature 1..3777: note = Sequence codon optimized for human expression
  source 1..3777: mol_type = other DNA
atgaattataaaactgggttagaggattttataggtaaggagtctctctccaaaactttgagaaatgccctgatccctaccgaatctacaaagatacacatggaagagatgggtgtgatacgagacgatgaactccgtgccgagaaacagcaggaactgaaagagatcatggacgactactaccggacatttattgaggaaaagctggggcagattcagggaattcaatggaacagcctgttccagaagatggaagagactatggaagatatcagcgtgcgcaaagacctggataaaatacagaacgaaaaacggaaagaaatttgttgttacttcactagcgataagcgctttaaagacctcttcaacgcgaaactgatcactgatattttgcccaattttatcaaggataacaaggagtataccgaagaagaaaaggccgaaaaggaacagaccagggtactttttcagcgttttgccactgcctttactaactacttcaatcagcgaagaaacaactttagcgaggacaacatctcaacagccatcagtttccgtatcgtcaatgaaaactccgagatacacctccagaatatgcgggcctttcaacgaattgaacagcagtacccagaagaagtttgtggtatggaagaggaatataaagacatgctgcaggaatggcagatgaagcatatatattccgtcgacttttacgatcgcgaactgacccagccgggaatcgaatactacaatggaatctgcggcaagataaacgaacatatgaatcaattctgtcagaagaacaggataaataaaaacgacttcagaatgaaaaagctgcacaaacaaattttatgcaagaaatccagttattatgagatcccgtttaggtttgaaagcgatcaagaagtttacgacgcattaaacgagttcatcaagacgatgaagaagaaagagataattcgcaggtgcgtacaccttggccaggaatgtgacgactatgaccttggcaaaatttatataagcagtaacaagtatgaacagatctctaatgcactttatggaagctgggacactatccgcaaatgtatcaaggaggagtacatggatgctttgcctggaaagggtgaaaaaaaggaggaaaaggccgaagctgctgctaaaaaagaagagtatagaagcatagccgacatagacaagattatcagcttgtatggatccgaaatggaccgcacaatctcagccaagaagtgcattacagagatatgcgacatggcaggtcagatcagtattgaccctcttgtgtgcaactctgatatcaagttgctccagaacaaggaaaagactactgaaattaaaactatcctggatagctttctgcatgtgtaccagtggggccaaacattcattgtctccgatatcatcgaaaaggacagttacttctacagcgagctggaggacgtgttggaagacttcgagggcattaccacactctataatcacgtcagatcttacgtaacccagaaaccttattccacagtgaaattcaaactgcacttcggttcacctaccctggccaacggctggagccagagtaaagaatacgataacaatgccattttgctgatgcgtgaccagaagttttacctcggaatctttaacgttaggaataaacctgataagcaaatcattaaaggacatgaaaaggaggaaaagggcgactacaaaaaaatgatttacaatctgctccccggaccctctaagatgctcccgaaggtcttcatcacatctagatctgggcaggagacatacaaaccaagcaagcacatactcgacggatacaatgaaaaacgacatataaagtcttcacctaagttcgacctgggatattgctgggacctcatcgactattacaaagagtgtatccacaaacatccggattggaaaaattacgactttcatttttctgatacgaaggactatgaggacatctctggattttatcgcgaagtcgagatgcaaggatatcagatcaaatggacttacattagtgctgatgagatccaaaagctcgatgaaaaaggacaaatattcctctttcaaatctacaataaggattttagcgtgcacagcactggaaaagacaaccttcataccatgtacctgaagaacttgttctctgaagaaaacttgaaggatatcgtgttgaagttgaacggggaggcggaactttttttccgcaaagcttccataaagactccaatagtccataagaaaggctcagtattagtgaatagatcttatacgcagactgtggggaataaagagatacgcgtcagcatccctgaggagtactacacggagatctataattatctgaatcatattggcaaaggcaaattgtcaagcgaagcccagcgttacttagatgagggaaagatcaaatcctttaccgctactaaggacatcgtaaagaactaccgttactgttgtgaccactattttcttcacttaccaataaccattaacttcaaggcgaagtctgatgttgccgtgaacgagcggacccttgcttacattgctaagaaagaggacattcatatcattggtatcgatcgaggcgaacgcaatttactttatatttcagtcgtggatgtgcatggaaacatcagggagcagaggagctttaacattgtgaacggctacgattaccagcagaagctgaaggatcgagagaagtcacgagacgctgccagaaagaattgggaggagattgagaagattaaggagttgaaagaaggctacctgagcatggtgattcactatatcgctcagttggttgtgaagtacaacgcagtcgtggctatggaagacctgaattacgggttcaagaccggccggtttaaggtcgaacggcaagtttaccagaaattcgagacaatgttgatcgagaagctgcattatctggtgtttaaagacagggaggtttgtgaagaaggcggcgtcctgagaggctatcagctcacatacattcctgaaagtctgaagaaagtggggaagcagtgtgggttcattttctacgtaccagccggatatacatccaagattgaccctacaaccggttttgtaaatctgtttagcttcaaaaacctgacgaacagggagtctcggcaggactttgtaggcaagtttgacgaaatccgatacgacagagacaagaaaatgtttgagttctctttcgattataacaattacattaaaaaagggacgatcctcgcctccacgaaatggaaggtatatactaatggaacacgccttaagagaatcgtggtcaatggtaagtatacaagccagtctatggaggtggaactgactgatgcgatggagaagatgttacagagagccggaatagagtatcacgatggaaaggatctcaagggccaaatcgtagaaaagggcatcgaggccgagatcatcgacatttttagactgacggtccagatgagaaacagtcgctccgagtcagaggatagggaatacgatcgcctgatctcacccgtcttgaatgacaagggcgaatttttcgacaccgctacagctgacaagacccttcctcaggatgccgacgctaatggtgcttattgcatcgccttaaagggactgtacgaggtgaaacagatcaaggagaactggaaggaaaatgaacaatttcctagaaacaaactggttcaggacaacaaaacctggtttgatttcatgcaaaaaaaaagatatctg

SEQ ID NO: 733 - DNA, 3915 bp, synthetic construct
  misc_feature 1..3915: note = Sequence codon optimized for human expression
  source 1..3915: mol_type = other DNA
atgaataaagctgctgataattacacaggaggaaactatgatgagtttatcgccctttctaaagtgcagaaaaccctgcgcaacgagctgaaaccaacaccattcacggcagagcacatcaagcaacgagggattatcagcgaagatgaatatcgcgctcagcagtcactcgagttgaaaaaaatcgctgatgaatactataggaactacatcacccacaagcttaatgacattaataacctcgatttctacaatctctttgacgctattgaagagaagtataagaagaatgacaaggacaatcgcgataaactggacttggtagaaaaatccaagagaggtgaaattgccaaaatgctgagtgcggatgataatttcaaatccatgtttgaagcgaaactgattactaaattgctgcccgactacgtggaaaggaattataccggcgaagataaagaaaaggccctcgaaacactggcactgttcaaggggttcacaacgtacttcaagggctactttaaaacacgaaaaaatatgttctcaggcgagggaggggcttcttctatctgccaccgcatcgtgaatgtcaatgcttctattttctatgacaatctcaagaccttcatgcgaattcaggagaaggctggcgacgaaatcgccttgatcgaggaggaactgactgaaaagcttgacggctggcggctcgaacatatcttctcccgtgactactacaacgaggttctcgctcagaagggcatagattattacaatcagatttgcggagatattaataagcacatgaacctctattgtcagcaaaacaaattcaaggccaatatattcaagatgatgaaacttcagaagcagattatgggcattagcgagaaggtgtttgagattcccccaatgtaccagaatgacgaagaagtgtacgctagcttcaacgaatttatcagcaggctggaagaagtgaaattaacagaccgattgcgtaacatcctgcagaatatcaatatttataatactgccaagatttatattaatgcgaggtattacaccaacgtgtcaacctatgtatacggcggctggggcgtcatcgagtctgcaatcgaaaggtacctctgcaacacaattgcgggaaagggccaatccaaggtgaagaaaattgaaaatgccaagaaagacaataagtttatgtccgtgaaagaactcgactccattgtagctgagtatgaacctgattacttcaatgccccttatatcgacgacgacgacaatgcagttaaagtgttcggtggccagggcgttttaggctactttaataagatgagtgagctgctcgctgatgtgtccttgtatacaatcgactataatagcgatgattcactcatcgaaaacaaggaatccgccctgagaataaaaaaacagttggacgatatcatgtccctgtaccattggctgcaaacgttcatcattgatgaggtggtagagaaggacaacgcgttctacgcagagctggaggacatctgctgtgaattagaaaatgttgtaacgttatatgaccggatcagaaattacgtcacacgaaaaccctattcaactcaaaaattcaagttaaatttcgccagtccaaccctggcaagcggatggtcccgatctaaagaatttgacaataatgctattatcttgctgagaaataacaaatattacatcgcaatttttaacgtgaataataagccggacaaacaaataattaaaggcagcgaggaacagagactgtctaccgattataaaaagatggtctacaatctgctgccaggccctaataaaatgctgcctaaggtgtttatcaaatccgataccggcaagcgcgattataacccaagctcctatattctggaggggtacgagaaaaatcggcatattaaatcaagcggcaacttcgatattaactactgtcacgacctgatagattattacaaggcatgcatcaataagcatccagagtggaaaaattacggattcaagttcaaggagactaaccagtacaatgatatcggtcagttctataaagatgttgagaagcagggatattccatctcatgggcatatatctcagaggaagatatcaacaaacttgatgaggaggggaagatatacctgttcgaaatttacaataaagatttgagtgcacactccaccgggagagacaatttacatacgatgtatttgaagaacatcttctccgaggacaatctcaagaatatttgcatcgagctgaatggagaggcagaacttttctatagaaagtccagtatgaagagcaacatcacacacaagaaagatactatcctggtaaataagacctacatcaacgaaacgggcgtacgcgtgtcactgtcagacgaggactatatgaaagtgtataattactacaataataattatgtaatcgacacagaaaatgacaagaatttaattgacataatcgagaagatcggtcacaggaagtccaagatagatatcgtaaaggacaagaggtataccgaggataagtatttcctctatctgccaataaccatcaattatggtatcgaggatgaaaatgtgaatagtaagatcattgaatatattgccaagcaagacaatatgaatgtgatcggaatcgaccgaggtgagcgaaatctcatttatatctcagttatcgataacaaaggcaacatcatcgagcagaagagcttcaacttggtgaacaactatgattataaaaacaaacttaaaaacatggagaaaacccgggataacgcaagaaagaactggcaagagattggcaagattaaagatgtgaaatccggatatctctcaggagtgatctccaagatcgcccgaatggtgattgactataatgccatcattgtcatggaggacctgaacaagggctttaaaaggggcagatttaaggtcgaacgacaagtgtaccagaagttcgagaacatgctgatctcaaaactgaattacctggttttcaaggaaagaaaggctgacgagaacggggggatacttcgtggatatcagctgacatatatccccaaatctattaagaacgtcggcaaacagtgcgggtgcatcttctacgtacccgccgcctataccagtaaaatagacccagccaccggctttatcaacattttcgacttcaaaaaatattccggttccgggatcaatgcaaaggtcaaagataagaaggagttcctgatgtcaatgaacagtatcaggtatatcaacgaaggaagcgaagagtatgaaaaaattgggcatagggagctgtttgcttttagcttcgactacaacaatttcaagacgtataatgtttcttctcccgtgaacgagtggacggcttacacttacggtgagagaatcaaaaagctgtataaggacgggcgctggctgaggagcgaagtcctgaatctcactgagaatctgatcaaactgatggaacagtataatatcgagtacaaagacgggcacgatatccgtgaagacataagccacatggacgaaacccgtaatgcagacttcatatgcagccttttcgaagagttgaaatataccgtgcagttgcgtaactctaaatccgaagctgaagatgagaattacgacagactggtgtccccaatcttgaactcatccaatggattctatgattcctctgattatatggaaaatgagaataacactacacataccatgcccaaagatgctgatgcaaatggagcctactgcatagcccttaaaggcctgtacgagataaataaaatcaaacagaactggtccgatgacaagaagttcaaggagaatgagctgtacattaatgtaaccgagtggctggattatattcagaatcgcagattcgaa

SEQ ID NO: 734 - DNA, 3786 bp, synthetic construct
  misc_feature 1..3786: note = Sequence codon optimized for human expression
  source 1..3786: mol_type = other DNA
atggctaaaaacacaatctttacacaattcactggactgtatcccgtttcaaaaacactgcgattcgaattaaagccaatgggaaaaaccttggaaaagatcaaagaaactggcgttattgagaatgacaagaaacgccacaacgattactttgacgccaagaagattattgataagtaccacaagtactttatcgacgccgccctttcaaagtttagccggatagattggaacccgctgaaggaggccattgagggttccttggataggagcgacgcgagtaaaaagaagctcgaaaagacgcagacggagtttaggaagaagatagcgaaggcccttactacccatgatcactacaaagagcttactgcctctacccctaaggacttattcctgaaggtgttccctgaccacttcggcaaacagccagcaatagatacttttgatggcttcagtagctactttacaggttttcaggagaatcgccagaatatctactccgatgaagctatcagcactgccatcccgtaccggttggtgcacgacaatttccccaagttcctctctaatattgaggtctacaagactctgaaggataatgctccaagcgtcttgtccgatgcagagaatgaactgaaagacttcctcaatggcaaacccctcgccaacatctttgagctgaatgcctacaatgacgtgttgactcagagtggcatcgacttcttcaatcaggtgattggcgggatttcaggcgaggggggcgagaaaaaaactcgcggaattaacgagttcagtaacctctatcgccaacagcacccggaattcgcccaaaagcggctcgccacaaaaatgattccactctataagcagattctgtctgacagagagaccaaatctttcattctggaatcttatagcaccgatagccaggtgcaagagtctgtcaaagagttctttgagtcccagatcctcaattgtgatatcgctggccgtaaggttaatgtgcttaatgaactgacttctctgattaagagaatcgctgaatttgacctgggaagcatttatattaatcaagaggagctcagtaacatctctctcgagctcttcaagtcatggaatacaatcaacgctgtgttgttcaaaaatgctgaaaatcgcatcggatccgctgaaaaggcagctaataagaagaaaattgatgcatggatgaagtccaatgagttcagcatcgctactctgaatctcgctatcgcggagtctgactctgaggagatttccagagtgaagatagaatcctactggaatgatttcgaggcaaaggtacagagtattctttgtggagacaatcggaggaatctcgacgagttcttgtccgcaacctttaacgagaacaacgcgctgcgcgaggactcagaaatcattggcaagctcaaggcattccttgacgccctgatcgaaatcatgcactccattaaacctttgataagcgacgcggagaacagagatctgtctttctataatgaactgatgcccctttacgatcaactttcactggtggtccctttgtataataaaattcgcaattatgcgacacagaaactcacagaatcagagaaatttaagctgaacttcgacaacccaaccctggccgacggatgggatcagaataaagaagatgccaacactgctatcctgctgctcaaaaacggactgtactatcttggcattatgaacgccaagaacaaacccaaaatcaaagatttcaaaacatctgaatctgaagactgctatgataagatggtgtacaagctgctgcctggtcctaacaagatgctcccgaaagtgtttttctccgagaagggtttagctacttttaagccacctaaagacattctggatggttacaatgctggaaaacataaaaaaggagatctctttgacattggattctgtcaccagcttatcgactttttcaaagaatccatcgcgaagcacccagactggaaaaaattcgacttcaaattctccgacacatcctcctatgaagatattagtgggttctacaaggaggttacagatcaaggctacaagatcaccttcagcaaaatccccaccagtcagattgatgaatgggtgaacgagggaaaactcttcttatttcagatttacaacaaagatttcgcaccaggggcaaaggggtccccgaatctgcacaccttgtactggaagtccgtgttttcacctgagaacttgaaagacgtggttgtgaaactgaatggagaggctgaactcttttataggcccagctctgtaaagaaaccttatagtcacaaggtgggcgaaaagctggtgaacaggattggtaaagacgggctgccactgcccgaatctgttttcggggaattattccggtatttcaatgggaaattagatggcgaattaagcgacgaggccaagcgctatctggatgtggccgtggttaaggacgtgaagcatgagatcgtgaaagataggaggtatacacaggacaagtttgagttccatgtgccactcacgctcaacttcaaagctgacagcaagaacgagtatatgaatgagcgggtccggcacttcctcaaggataatcctgacgttaatatcatagggatcgatagaggagagaggcacctcctgtatatgacgctgattaaccaaaaaggtgagatactcaagcaaaagagctttaacattgtggagtctgtgaattaccaggccaagctggttcagagggaaaaagagcgggatgcagcacgtaaaagctggagctctgtcggaaaaattaaggatctgaaagaggggtttcttagtcaggttatccatgagataacaaccaccatgattgaaaacaacgcaattgtggtgctcgaagatctgaattttggcttcaaacgaggccggttctgtgtagagcggcaggtgtatcagaagttcgaaaagatgctgatcgacaaactgaattacctggtgttcaagaataaacctgagggggacgtgggtggtgtcctcaaggggtaccagctggccgagaagttcgattcattccagaaactggggaagcagagtgggttcttattttacataccagctgcgtacacctccaaaattgatccaacgaccggtttcgctaatttgttcaacatgacagaattgacctctgctgaaaaaaaaaaagatttcttgagccacttcgatgacataacctacgacgggaagaacgacaggttcctgtttgggttcgactataagaactttaaatgttttcagactgatttcattaagaaatggacagtttacacccaaggaaaaagaatcgtttatgataaggaaagcaaatcagcaaaagagatttttcctgtcgaaattataaaagctgctctggcaaaacagaatatcgccctcactgaccagctcgatgtgctgtccgctattaattccgttgaagcctctcccaagtccgcctcttttttcgggaatatatgctatgcttttgagaaaacgcttcagatgcgcaactcaattccaaacaccgacgaggattaccttgtgtccccagttatgaataaaagaggtgagttttatgacagcagaagttgtgatgacgctctgccccagaacgctgatgccaacggtgcctatcacatcgcattaaaaggcttataccttatcaaaaacgtattcgatgctggtgggaaagatctgaagatatcccacgaggactggtttaaattcgctcagagccgcaattgc

SEQ ID NO: 735 - DNA, 3813 bp, synthetic construct
  misc_feature 1..3813: note = Sequence codon optimized for human expression
  source 1..3813: mol_type = other DNA
atgaaaaaccttgccaactttactaatctgtactccctgcagaaaaccctgcgcttcgagctgaagcccatcggcaagacactggattggattattaaaaaagacctcctgaagcaggacgagattttggccgaggattacaaaattgtcaaaaagattatcgatcgataccataaagatttcatcgatctggcattcgaaagtgcctatctccagaaaaagtccagcgactcttttactgccattatggaggcctcaatacagagttattcagagctctactttattaaggagaagtctgaccgggataagaaagccatggaggagatatctggtattatgagaaaggagatcgttgaatgcttcacggggaaatattccgaagtggttaaaaagaagtttggcaacctctttaagaaagaactcattaaagaggacctgctcaatttctgcgagcccgacgagctgccgataatccagaagttcgccgatttcacaacgtattttaccggctttcacgagaatagagaaaatatgtacagcaacgaagaaaaggcgactgcaatagcaaacaggctgatacgagagaaccttcctaggtacctcgataacttacggattattagatccatacagggccgttacaaagatttcggatggaaggatctggaatccaacttaaagcgcattgacaagaacttacagtactcagactttttgacggagaacggcttcgtatatacgtttagccagaaaggcatcgatcggtacaacctcatcctgggcggacagtccgttgagagcggagagaaaatccagggactgaacgaattaatcaacctgtacagacaaaaaaatcagctggaccgtcggcaacttcctaacctgaaagagctctacaagcagattctttccgatcgcacccgccactcttttgtaccagaaaagttcagctccgataaagccctgcttagatctttactggacttccataaagaagtgatccaaaacaagaacttattcgaggaaaagcaggtatcacttctccaggcaatccgggaaacattaaccgacctgaaatcctttgatcttgacaggatctacctcaccaacgatactagcttaacacagatctctaattttgtgttcggggattggagcaaggtcaagacgatcctggccatatattttgacgaaaacatagcgaacccgaaggacagacagcggcagtcaaactcctacctgaaggccaaagaaaactggttgaaaaagaattactactcaatccatgaacttaacgaggccataagtgtgtatggtaagcacagcgatgaggagctgcctaacacaaagatagaggactattttagtggcctgcaaaccaaagatgaaactaagaaaccaatcgacgtgctcgatgcaatcgtttccaaatatgctgacctggagagcctccttactaaggagtatcctgaggataagaatttgaaatccgacaaggggagtatcgaaaaaatcaaaaactaccttgacagtattaagctcctccagaactttctcaagccccttaagccgaaaaaggtccaggacgaaaaagatctgggattctataacgatcttgagctgtacttagaatcactcgaatctgcaaacagtctttataataaagtacgaaactatctgacaggaaaagaatatagtgacgagaagattaagctcaacttcaagaattctactctcctggacggctgggacgagaacaaggaaacttcaaacctgtctgttatttttagagatacgaataattactacttaggaatcctcgacaagcaaaacaatcgaatatttgaatccatccctgagatccagtccggagaagagacaatccagaagatggtgtacaagctgttacccggtgcaaataatatgctccccaaagtgttcttcagtgagaaaggtctcctcaagttcaacccctccgatgaaatcacgagtctctacagtgaaggacgatttaagaagggagataaattcagtatcaattctctgcatacacttatagatttttataagaagtccttggcagtgcacgaagactggagcgtgttcaacttcaagttcgacgagacctcccattacgaagacatcagtcagttctacagacaggtggagtcacaagggtataagatcacatttaaaccaattagcaaaaaatacattgacacgcttgtcgaagacgggaagctttacctgttccagatttacaacaaggacttctctcaaaacaagaaaggcggaggcaaacccaacctccatacaatctactttaagtccctgttcgagaaggagaacctgaaggatgtcattgttaagcttaacgggcaggcagaggttttttttaggaaaaaaagtattcactacgacgagaacatcacacgctatggacaccactctgaactgttgaaggggagattcagttatcctatcctcaaagacaagcgatttacagaggacaagttccagttccacttcccaatcacactcaacttcaaaagtggggaaattaagcagttcaacgcccgcgtgaatagctatcttaagcataataaagacgtgaaaatcatcggtattgatcggggggaacggcatttactgtacctctccctcattgaccaggacgggaagatccttcgacaggagagtctgaacctgatcaaaaacgaccagaatttcaaggcaataaactaccaggaaaagttacataagaaggaaatagaacgtgatcaggcaaggaaaagttgggggtctatcgagaacattaaagaattgaaggaagggtatctgtcccaggtggtgcataccatctctaagctgatggtggagcataacgccatcgtggtcctggaggatctgaatttcgggtttaagaggggacggcaaaaagtcgagcgacaggtgtatcagaagttcgaaaaaatgcttatcgagaaactgaatttcttggttttcaaggataaagagatggatgagcccggtggcattctcaaagcataccagcttaccgataacttcgtctcttttgaaaagatggggaaacagacagggttcgttttttacgtccccgcttggaacaccagcaagattgacccaaagactggatttgtgaactttctgcatttgaattatgaaaacgttaatcaggctaaagagctcatcgggaagtttgatcagattcgatataaccaggatagagattggttcgaattccaggtcacgactgaccagtttttcaccaaagaaaatgccccagacacccgcacttggatcatttgctccacccctacgaaacgcttctacagcaaaagaacagtcaatggatccgtgtctaccattgaaattgacgttaaccagaaactcaaagagcttttcaacgactgcaattaccaagacggagaggatcttgtggaccgtattctcgaaaaggactcaaaagatttcttctccaagttaatcgcctatcttcgcatactgactagtttgagacaaaacaacggagagcagggattcgaagagagagactttatcttatctcctgtcgtgggcagcgatggaaaatttttcaacagtttggatgcctccagccaggagcccaaggatgctgacgctaacggagcctatcacatcgccctgaaaggactgatgaatctgcatgtgatcaacgagacagatgatgagtccctggggaaacccagctggaagatcagtaacaaggattggctcaatttcgtttggcaacggccctcccttaaagcg

SEQ ID NO: 736 - DNA, 3735 bp, synthetic construct
  misc_feature 1..3735: note = Sequence codon optimized for human expression
  source 1..3735: mol_type = other DNA
atggaaaccttcagtggctttacaaatttgtatcccctgagcaagactctgcgcttccgactgattcctgtaggagaaacactgaagcactttattggaagtgggatcttggaggaagaccaacatagggctgaatcctatgtgaaggtcaaagctattattgacgactatcataggacttatattgaaaacagcttgtctgggtttgaactccctctcgaatccaccggaaagtttaatagtctcgaagagtactacctgtatcataacattcgcaataagacggaggagattcagaacctctcctccaaggtgagaaccaatttgaggaagcaggtagtgacacagctgacaaagaacgagatatttaagcggattgacaaaaaagagcttatccaatcagacctgattgattttgtcaagaacgaacccgacgctaacgaaaagattgccctcatttcagaattccggaacttcacagtatattttaaggggttccatgagaaccggcgaaacatgtattccgatgaggaaaaatccaccagcatcgcctttaggttaatccacgaaaaccttcctaagttcattgacaacatggaggtctttgccaagatacagaacaccagcatttcagaaaactttgacgctattcagaaggaactgtgtcccgaattggttactctgtgtgaaatgttcaagctgggctacttcaacaagaccttatcccagaagcagattgacgcgtataacactgtgattggcgggaaaaccacttccgagggcaagaaaattaagggcctgaatgaatacatcaatctgtataatcagcagcataagcaggaaaagctccctaaaatgaagctgctcttcaagcagatcctgtctgatcgcgagtctgcctcctggctgttggagaaattcgaaaatgacagccaggtcgtcggagccatggtcaatttttggaacactatccacgatacagtgctggcagaaggcggcttgaaaactatcattgccagcctgggctcctacggactggaaggcattttcctcaaaaatgacctgcagctgaccgatatctctcagaaggccacaggctcatggtccaagatatctagcgaaataaagcaaaaaatcgaagcaatgaatccgcagaaaaagaaggagagctatgagagttatcaggagcgcatcgacaagctgttcaagtcatacaagagcttcagcctggctttcgtgaacgagtgcctgcgcggcgagtataagatcgaggactactttctgaagctgggcgctgtcaatagttccctgctgcaaaaggaaaatcattttagccacattctgaacacctatacggatgtgaaggaggtcatcggcttctacagcgaaagcactgacactaagctcattcaggacaacgactccatccagaaaattaagcagtttctcgacgcagttaaggatctgcaggcttatgtgaaacccctgctgggcaactcagacgaaaccggaaaagacgagaggttttatggagaccttattgagtattggtctttgttggatcttatcacacccctgtacaatatggtaaggaattacgtcacacaaaagccatattctgtggacaagattaagatcaattttcagaatcctacactgctgaacggttgggatctcaataaggaaatggacaacactagcgtgatattgcggagagacggcaagtactatttagccatcatgaacaacaaatcacgcaaagtcttcctgaaatatccgagtggcaccgaccgcaattgctatgagaaaatggaatataagttgttgcctggggcaaacaagatgctccccaaggtgtttttcagcaagtcaagaatcaatgaattcatgcctaatgagcgattgttatcaaactatgagaagggcacccacaagaaatccggcacttgctttagcctggacgattgccacaccctgatcgacttcttcaagaaaagtctgaacaagcacgaggattggaagaatttcggctttaagttttccgatacttctacttatgaggacatgtcaggtttttacaaggaggtggaaaatcaggggtataaactttccttcaagccaattgacgccacctatgtggaccaactggtggacgaaggaaaaatctttctgtttcagatctacaataaagatttctctgagcactctaaaggcaccccgaatatgcatacactctattggaaaatgttatttgacgagactaatctgggggatgttgtttataagctcaatggcgaagccgaagtgttctttaggaaggccagtataaacgtctctcaccccactcacccagctaatatccctattaagaaaaaaaatctgaaacataaggacgaggagcggattctcaagtacgatctgattaaggacaaaagatatacagtggatcagtttcagttccacgtgccgatcaccatgaattttaaagcaaatggcaacggaaatatcaaccaaaaggccattgactatcttagaagtgcctccgacactcatattatcggtatagatcggggggagcggaacctgctgtaccttgtcgtgattgatggaaatggaaaaatctgcgaacaattttccctgaacgagattgaagtggagtacaacggggaaaaatacagtaccaattatcacgatcttttaaacgtgaaggaaaatgaacgcaaacaggcccgccaatcttggcagagtattgcgaacattaaagatctgaaggaagggtacctgagccaagttatccacaagatatctgagttgatggtgaagtacaacgcaattgtagtcttggaggatttgaacgctgggtttatgagaggtcggcagaaagtagaaaaacaagtctatcaaaaattcgagaagaagctgatcgagaaattaaactacttagtttttaaaaagcagtcatccgatctgccgggaggccttatgcacgcctatcagctggcgaataagttcgagtcctttaataccttgggaaaacaaagtggattcttattttatatccctgcttggaacaccagcaaaatggatccagtgacggggttcgtgaacctgttcgacgtcaagtacgagtctgtcgataaagccaaatccttctttagtaagttcgatagcatacgctacaacgtggagcgggatatgtttgaatggaagttcaattatgatgaattcaccaagaaggcggagggaaccaagacagattggaccgtttgctcctacggaaatcgcattatcacatttaggaatcctgataaaaatagtcagtgggataacaaggagattaatctcacggaaaatatcaaactgctgtttgagcgctttggaatcgacctgagctctaacctgaaagatgagattatggagagaactgagaaggaatttttcatcgaacttattagcttatttaaattggtcctgcagatgagaaactcatggacagggactgatatagattatctcgtgagccccgtgtgcaatgagaatggcgagttcttcgactctagaaatgttgacgagacactccctcagaatgcggacgccaacggtgcctataacatcgcaagaaaagggatgattctcctggataagatcaaaaagaacaatggtgaaaaaaagcttacactgtccattactaatcgggagtggttatcttttgcacagggctgctgcaagaacggt

SEQ ID NO: 737 - DNA, 3735 bp, synthetic construct
  misc_feature 1..3735: note = Sequence codon optimized for human expression
  source 1..3735: mol_type = other DNA
atgcaggagcacaagaagataagccacctcacacatcggaatagcgtgcagaagactatacgcatgcagctcaaccctgtgggcaagacaatggactatttccaggctaagcaaattctcgagaacgacgaaaaactcaaagagaattatcagaaaatcaaagagattgccgaccggttttataggaacctgaacgaagacgtgctctctaaaacgcgtctggataaactcaaagactataccgacatctattatcattgtaatacggacgccgataggaaaaggctggacgagtgcgcgagcgagctgaggaaggaaattgtgaaaaactttaagaacagggacgagtataacaagttgttcaataaaaagatgattgaaattgttctgcccaagcatcttaagaacgaagacgagaaagaggttgtgacgtcttttaagaattttaccacctacttcacgggcttctttacaaaccggaagaatatgtactccgatggagaggagtcaacggccatcgcatatagatgtataaacgaaaatctccctaagcacctggataacgtaaaagctttcgaaaaggcaatctcaaagctttcaaagaatgcgatcgatgatttagatactacttactcaggactgtgtgggacaaacctgtatgatgtgtttaccgtcgactatttcaatttcctccttccacagagcggtatcacagaatacaacaaaatcatcggggggtatacaaccaatgacggaactaaggtgaaaggaattaatgaatacataaatctctataatcagcaagttagcaaaagggacaagattccaaatctgaagatactgtataagcagattctctccgagtcagagaaggtttcatttatcccacccaaattcgaggacgacaacgagctcctgagtgcagtgtctgagttttatgctaatgatgagacatttgatggcatgcccctgaaaaaggccatagatgagaccaagctcctgttcgggaacctcgacaatccctctctgaacggcatttatatccagaacgaccgttcagtcacaaacttgtccaactctatgtttggttcttggagcgtgatagaggacctctggaacaaaaactacgattccgtgaatagcaactctcgaataaaggatattcaaaaacgagaggataagcgcaagaaagcttacaaggccgagaagaaattaagcttgtcctttctgcaggtgctgatctccaactccgagaacgatgagattcgggagaagtcaatcgtggactactacaaaacaagcctcatgcagctgactgacaacctcagcgataagtataatgaagcagcaccccttctgaacgaaaactactcaaatgaaaagggcctcaaaaatgatgataagagcattagcctcatcaagaacttcctggatgcaatcaaggagatcgagaaattcattaagcccctgtctgagactaacattactggagaaaagaatgatctgttctattcccagttcactccactgctggacaatatttcacggattgacatcctctacgacaaagtacgcaactacgtgacacagaaaccttttagcaccgacaagattaagctcaactttggtaactcacagctcctgaatggttgggacagaaacaaagagaaagactgcggggctgtgtggctctgcaaagatgagaaatactatttggcgattattgacaagagtaataatagtatcctggaaaatatagattttcaggactgtgacgagtctgattgttatgagaagatcatttacaagttgttacctggaccaaacaagatgcttcccaaggtgtttttcagtgagaaatgtaaaaaactgttgagtcctagtgatgaaatccttaagatttacaagtccggtacatttaaaaccggcgataaattcagcctggacgactgccataagttgattgacttctataaggaatcattcaaaaagtatccgaattggttaatttacaatttcaaatttaagaaaactaacgagtacaatgacattcgggagttttataatgacgtagcactccagggctacaacatctccaagatgaagataccaacatccttcatagacaaactggtcgatgagggaaagatctacctcttccagctgtacaacaaggacttcagtccccactcaaagggaacccctaacctgcacaccctctactttaagatgctctttgatgagcgcaacctggaggatgttgtgtataggcttaacggagaagccgaaatgttctatcggccagcttctattaagtatgacaaaccaactcatcccaagaacactcctattaaaaacaaaaatactttgaacgataagaagacttccaccttcccgtatgacttaattaaggacaaacggtataccaagtggcaatttagtcttcacttccccataacaatgaacttcaaagcgcctgacaaagcaatgatcaatgacgacgttcggaacctgctcaaaagttgtaataacaacttcatcatcggtatcgataggggcgaacgtaatttactctatgtgtctgtgattgactcaaatggggccataatctaccagcacagcctcaacatcatcgggaacaaatttaaagagaaaacctacgaaactaactaccgtgagaaactggccacccgggagaaggaacgcactgagcaacggcgaaactggaaagctattgaatccatcaaagagctcaaagagggctatatatcccaggccgtgcacgttatttgtcaactcgtagtgaagtacgatgcgattatcgttatggagaaattgacggatggatttaaaaggggacgtactaaattcgagaagcaggtgtatcagaaattcgagaagatgctgatagacaaactgaattactatgtcgacaagaagttggacccagacgaggagggaggcctgctgcacgcctaccagctgacaaataagctcgaatcatttgataagttgggcatgcagtctggctttattttttatgtgagaccggactttacctctaagattgatcccgtgacaggattcgttaaccttctttatccacagtatgagaacattgacaaagccaaggatatgatctccagattcgacgagatcaggtacaatgcgggagaggacttctttgagtttgatatcgactacgatgagttcccaaagaccgccagcgactatcgcaaaaagtggactatctgcacaaatggggagcgcatcgaagcctttcggaacccagcgaacaacaatgagtggagctaccgaacgatcatcttggccgagaaattcaaggaactctttgacaataattccatcaactacagagacagtgacgatctcaaagcggaaatactgagtcagactaaagggaagttctttgaggactttttcaagttgctgcgcctgaccttacagatgaggaacagcaatcccgagactggagaggaccgaatcttgagtccagtgaaagacaaaaacgggaatttctatgatagtagcaagtacgatgagaagtctaagctgccctgtgacgctgatgcgaacggggcttataatattgcccgcaagggcttgtggatcgtcgaacagtttaagaaagccgacaacgtctctaccgtggaacccgttatccataacgatcagtggctgaagtttgtgcaagagaatgacatggccaacaac

SEQ ID NO: 738 - DNA, 3900 bp, synthetic construct
  misc_feature 1..3900: note = Sequence codon optimized for human expression
  source 1..3900: mol_type = other DNA
atgaatttccaacctttctttcagaaattcgtgcacctctatcctatctccaagactttaagatttgagcttatcccgcagggagcaactcagaaattcatttccgagaagcaggtcttactccaagacgagattagggccagaaagtacccagaaatgaaacaggcaattgacggctaccacaaggatttcatacagcgggcacttagcaacatcgacagccaggtcttcgaacaagctctgaacaccttcgaagacctttttctcagatctcaggccgaaagggccacagatgcttataaaaaagactttgagaccgcccagacaaagctgcgggagttgattgtgcactcctttgaaaagggcgagtttaagcaggagtataaaagcctctttgataaaaacttaataactaacctgctgaagccttgggtggaacaacagaatcagatcggcgactccaactatacgtaccacgaggactttaataagtttacaacatatttccttggtttccacgaaaatcggaaaaacatatacagcaaggacccccacaagaccgcactggcttaccggttgatacatgagaacctgcctaagtttttagagaacaataagattttgcttaaaatccaaaacgatcaccccagcttgtgggagcaactgcagaccctgaatcagacaatgccgcagttgttcgacggttgggacttttcccaactcatgcaagtctccttcttctccaacacgttgactcagaccggcatagaccagtacaataccattattggcggtatctccgagggggagaaccggcagaaaatccaggggatcaatgagcttatcaacctttacaatcaaaagcaggacaaaaagaaccgagttgctaagctcaagcagttgtacaaacagattctgtcagataggagcactctttctttcctgcctgaaaagtttgtggacgatacagagctctaccacgctattaacatgttttacctggaacatctccaccatcagtccatgatcaacggtcacagttataccctgttggaaagagtgcagttgctgataaatgaactggctaattacgatctcagtaaggtttacttagcccctaaccaattgtccacagtaagccaccagatgtttggagacttcggctacataggcagagctctgaattattattacatgcaggtgatccaaccagactatgagcagctgcttgcatccgctaagacaaccaagaaaatagaggcgaccgaaaaattgaaaaccatctttttagacacaccacagtcactcgttgtaatccaggcagctattgacgagtacatccagttacagccttctaccaagcctcacacacagttgactgactttataatttctctcctgaaacagtatgaaacagtcgccgacgatcagagcatcaaagtcattaatgtgttctcagacatcgagggaaagtacagctgtatcaaggggctcgtgaacaccaagagtgagtctaaaagagaggttctccaggatgagaaacttgcgacagacattaaggccttcatggatgctgtgaataatgtcataaaactgctgaagcccttcagcctgaatgaaaaattggtagcatccgtggagaaagacgctaggttttactctgattttgaggagatttatcagtccctgttaatatttgtgccactttataacaaggtccggaactacattactcagaagccttactctactgagaagtttaagttaaattttaataagcctaccctcctttccggctgggacgccaataaggaggcagacaatctgtccattcttttacgcaaaaacggaaattactacctggccattatggacaccgcaaagggagctaacaaagccttcgagcctaagaccttgaaccagttgaaggtggatgataccacggactgttacgaaaagatggtctataaattacttagtggtccaagcaaaatgttccccaaagctttcaaggcaaagaacaacgagggaaattactatcctacccccgagttgctgacttcttacaataacaacgaacacttgaagaatgacaaaaattttacattggcgtcactgcacgcttacatcgattggtgtaaggagtatattaacagaaatccttcctggcatcaattcaattttaagtttagtccaactcagagcttccaggacatcagtcagttttacagtgaggtatcttctcagagttataaggttcactttcaaacgattccctcagattatatcgaccagttggtcgcagaggggaaattgtatctgttccagatctacaacaaggacttctcaccaaacgccaagggaaaggaaaatttgcatacactgtatttcaaggcactcttctctgacgaaaatctcaagcagcccgtgtttaagctgagcggagaggccgaaatgttttatcggcccgcctctcttcagctggccaacaccactatccataaagcaggagaacccatggcggcaaagaacccacttactcctaacgccaccaggacattagcctacgatattatcaaggaccgtaggtttactactgataagtatctcctccatgtccctatcagcctgaactttcatgctcaggaaagcatgagtatcaaaaagcataacgacctcgtgcgccagatgattaaacataaccaccaagatctgcatgtgatcgggattgacaggggtgagaagcacctgctctatgtgagcgtgattgatcttaaggggaacatcgtttatcaggagtccctgaactccatcaaatctgaggcacaaaacttcgagacaccctaccaccaactcctccagcacagagaggagggaagagcacaggcccggactgcatggggcaagattgagaatattaaggaactgaaggacggctatctctcacaggtggtgcatagaatacaacagctgatattgaagtacaatgcaatcgtaatgctggaggatctgaacttcggatttaaacgtggcaggtttaagatcgaaaaacagatttatcagaagtttgaaaaggcacttatccacaagctgaattacgttgttgataagagtacccaagcagacgagttgggcggagtgcggaaagcataccagctgaccgctccctttgaaagcttcgaaaagctgggaaagcagagcggcgtgttgttctatgtgcccgcctggaacactagtaagatagacccggtgacagggttcgtggatctgctcaaacccaaatacgaaaatctggacaaggcgcaggcgttcttcaacgcattcgactccatccactacaacgctcagaagaattacttcgagtttaaagtaaatttgaagcagttcgcaggcctgaaagctcaggcagcccaggctgaatggacaatctgctcctacggcgacgagcgtcacgtgtatcagaaaaagaatgctcaacagggggaaacagtgatcgtcaacgttacagaggaactcaaggtgttgtttgcaaagaacaacatcgaggtcgcacagtcagtcgagctgaaagagaccatctgtacccaaacacaggttgacttctttaagcggcttatgtggctgctgcaggtacttttggcattaaggtattcatcaagcaaggataagctcgactacatccttagccccgtggcaaacgcacaaggtgaattctttgacagccggcatgcttccgttcaactcccccaggactccgacgctaacggcgcttatcacattgcgctcaaggggctctgggtgatcgaacaattgaaagccgctgacaaccttgacaaagtgaaactggctatcagcaatgatgattggctgcattttgctcagcaaaagccatatctggct

SEQ ID NO: 739 - DNA, 3966 bp, synthetic construct
  misc_feature 1..3966: note = Sequence codon optimized for human expression
  source 1..3966: mol_type = other DNA
atgaccggaatattcaaagatttcacccatctttacgaactgcaaaagacgctgagattcgaactgatccccgtaggccgtaccaaggagttgctggaaaagaaccatgtgttcgaaaaagatgagaaaattgccgagaattataaagacgtgaagaagtatttcgatagattacacaaggagttcattaaagacgcattctcacacacaaacctgcccgaaaacctgctggaagggtatgagcagaagtacttcagccacaaactgaacccaagcagagcgtctcgcatcgacctggaaaagatcgcaaagaggctgcggacaatcctcctgaagagcttcaatacagaggctgaccagtggaagaatcggtacctcaagaatattgagcagaccttaaaaaataagaatgagaagcagcagaagaaggaacttgagaagaagttgaagaagattaaagagggaacaaaaggcattgaactgtttttcaaggtggaagtgttcgattttctgaagtacaaatacccggaagcccagatcaatggcaagtcaatttttgatcccttcaataagtttgggtgctatttcaaaaagtttcatgaaactagaatcaatttttacaaggacgacgggacttctaccgccatccccacgaggattatcaacgacaatctgagtatattcctcgaaaacaagaaaatctttgagtctaaatatagcaagaagcacaaatccgtatttgcgaagaatgaactgcgcatctttgtgttgttctacttcaataactgtttctcccagaaacagatcgatggctacaataataccatcgccctgatcaattccaatgtgaaccagctgcggcaaaacaatccagaagtgagcaagaaggatctgccctttttcaagagactgttcaaacagattttgagtcagccctctaaacaggaaattgaacaagattccttcattgaaatcttccaagatgaggatgtcttcccgacaatgcagaaattcataaatgagaataagatctgtatcccaaaggcgaagtcaatcttcaagaagttcatatcaagtcagaaggtgaaaagcgacgagtacaacatttcccaaatctatgtggccaagcgatttattaatacgatcagtaacaagtggttttccaactggaacaccatacgtaatctgctgatacccaaggataagaagaacattcctgatttcatttcagtgacctctctgaaagcagcacttcaaaaaacccaaaacattgtcgaagttaacgatctgttccgaaaagagtacagagacattcttgaagagggctcagacttctaccagatcttcctgaagatttgggagaaggagtttgagaaggctaccgacatctaccttaatgaaactaaggagattgaaaagatgataacagaagacaaaaaatatttacccaacaagaaggggaggctcaagagcgggaaaaagggcagtatccagaaggaaaaattcctcgactacacccagagcgttttcgatatttacctcatgatgaaatattttagcctggaaaagggcaaggaaagggtgtggaacccggaggcactcgacgaagatgccatcggtggtttctatgagaagttcaaggaatactacgaaaacattaatacttggaaatatttcaacgtgttcagaaattatctcacaaaaaagccttataacagcgagaagatcaaactcaattttgaatgtagctcactcctgtcaggatggtctaaaaactacgattcttacggagctctgatttttgagaaaaatgagaaatactacctggggatcataaatggcaccaagtttacaaaggatgagatagaacagctgtatctggatattagaaacaataatatttcactgcgacttgtgtacaattatcagaagccagatttcaaaaacttccccaagctgtttataagatcaagcggcagcaacttcgctccggctgtgaagaaatataaccttcctatcgacagcgtcctgaatatctacgataagggcttgtttaaaacaagcaataaatcaagccaaaactaccatgagagcctcaagaaaatcatagactacttcaaactgggcatatcccagcacgagagttacaaaggattcagtttcaaatggcaggagaccagtgagtatgataatatcagcgacttttacaaggacgctacaagatcatgttataaagtgacttgggagaacattaatttcagtaagctgtatgagttgattgagtctggacggctgtacctgttccagatttataataaggacttcgagctcgacgaaaatattgcccctaagggctataactttaaggacaaaaatgggaggagaaacctgcactcaatctactggaaggctcttttttctaacacaaatttcaaaaagactattttgaaactgaatgggggcgcagagctcttctaccgcaaactcacaaagaatctcacaaaagaccctattatcacggtgaagaatcagataaaaatcattaagaaaaacaataacatattccataagaagaggttcacccagaataagatctatttccactgccccgtgtccattaacttcacagagaacgactggaagataaacacaaagatctgtaataccatacgcaacaactccaaggtcaagatcataggcatagacagaggtgaaaagaaccttgcctactactccgtgatcgatcaccaaggtaacatcttggaaaccgactcctttaatgaggtgcaagaaagggaggacagggaacccacagattaccagaaaaaactcgatcaaatacaaaaagagagggattggcaacgcaagtcatggcaggagatctcttccattaaggaaatgaaaaaggggtatatctctcaagtggttcatcagatctgtaaattgatccgtaagtacgaagctattgtggtattcgaagacctgaatataggctttaagcgaggccggtttgccattgagaagcaaatatatcagaatctggagctggcactcgccaaaaaattgaactacatggtgttcaaggatgcaaaggaagaagaaacaggacattttctccaggcctaccagctcacccctcctgtcatcaactttcaagacattggaaagcagtgtggaataatcttttatgtgcctgctagttacacctctgcgatctgcccagcttgtggttttagaaagaacataagcacatttgtcgaaaagatcgagaagaatattgacttgattaacaagttcaatattgtgtacgaccccgacaaagaccgcttctgtttcagatataagagaagtgacttcattaagtctgaaaaggaaaaggaagacgatagcaaagtaaagttatattccaacaccaagttacccgatgactttaccttctactctaacgtcgaacgattcaaatatatcagggatcagaataatcggggggggaaggttgaactcaagtatcccaacgattcactgaagaaactgttccacgaaaatgggatcaattttcaaaatttttcaaacatctctcagcttatcaagacccgcaattttgagaatgagaatttttacaaaccatttatatatatcataagtctgatactgcaattacggaacaccaccattgagattaaccaaaatgagaacaacgagaaatatagggacttcatctcttgcccacactgttatttccattccgagaataacctgatcactctgaccaaacggtacaagggcaagaagccttttgagttcaacggtgacgctaacggcgcatacaacattgctcgcaaaggcatactgatattgcagaaaatcaataaggcgaaaaggctcgaggagattgagtacggtggcttaacagtgacacagcaggaatacgacaaatacctggctctggtgagttctaaaaaggcg

SEQ ID NO: 740 - DNA, 3732 bp, synthetic construct
  misc_feature 1..3732: note = Sequence codon optimized for human expression
  source 1..3732: mol_type = other DNA
atgctgttcgaggcgggagtgtttagactgcttaaagaacgcttcaaaaacgagaaggacacaactgtggacggtaacaacatcttcgatgaatggacacgttggacaggatacttcaaaaagtttttcgagacccgtaagaacttttacaagtctgacgatactagtactgccattgcataccgggtgatcaatcagaacttacgaagattttgcgagaacatccaaatattcgaaaaaattagtgagaagatagagttttctgaagtggagaaatctttcgacatctcctgcgccggaattttctccctggcatactataacgcctgtttactgcagggcggcatcgatacatacaataagatcatcggcggcgaagtggatgaaaaggacaaaaaaattcctggtattaatgagctgatcaacaaataccgccaggataattcaggcgagaaaatccctttcctgaaacagctcgataagcagatccatagtgcaaaagaggcctttatcgagagtatagagacgaacaaggaattggttgggaaactgaagacattctatgaaaatgcagaggtgaagattcaatcctttaggaacctcatcgccgatattgtcactgactattcaggctatgatatcgataaaatttatctgactaaagaggctgtgagccataatgctagccgttggtttgcctcctttgagagtttcgagagggatttatttgccgtcgtagcagagaagcagaacaagctggtgtacgagttgctgaggacgcataagaatgactctaagatcagtgataaagacggcaaattcagcttccctgactttatcaagtgctcacacatcaaacgggcacttgaaaagcaggaagggaggatttggaaaggggagtactatgaggacatagtggacttcgaaaagatcaaagacgttttcactcagtttctgtgcgtgttcaaattcgagctggagcagcaattctttagaaagaccacaagcgctcagacaggcgaacagactaagatcggttatgagattttcgtgacgaagatcaacgaactcatcacgagagaaaatcccgttatcgatctggaggagaagatagccattaaaaatttcgctgatgccaccctcttgatctatcagattgctaaatactttgctgtggaaaagagacgcgggtggctggataattacgatctcgacgatcgcttctacaagtcatccgacatcggctacctgaatttttatcgggatgcgttcgagcagatagtgcgaccatataacctctttcgcaattacctcaccaagaaaccatacaacaccaacaagtgggtcctgagtttcgaaaaccccaccctcgccgatggatgggataagaacaaggagaagactaatgctgccgtcatccttcgcaaagatgggagatactacctcggcattattaaggaggactgcaagtccttattcgcagaccgatattccaaagagatgagcgagggcattgagtcaggcagctttcagaagatggcttacaagttctttcctgaggcgtccaagatgattcctaaatgttcaacccagacgaaaaacgttaaggagcacttccgaaagagctcttccgactataacctcttccatgaaaaggactacaaaatcagcgtagcgattacgaagaatatttatgaactgaacaacgtgttttacagaaaagacaacatcgaggaatctttcgttcccaaaaacgacttcgagaaaaagttaggcgtgaaaaagttccagcggcagtacctcgagatttctcgcgataacaacgggtacaagcaggcgcttgctcagtggattgagttctgcatcaggttcctgaaggcctacaaatctactaccatttttgactattcccggctgcgcgaagccaaagaatacgaaagcttggatgccttctatcaggacatcaacgccttaacctacaatatctcttttgtgccaatctctgaacagtatatcaaagaaaagaatgacaatggcgagctgtttttatttgagatctataataaggactggtctctggggcccatggacaaaaacaggaagaggaccaaaaatctgcacacattatacttcgagcaactcttttctaaagaaaatgagcaggaaaatttcttatttcagctgaacggggaggccgagttattcttcaggcctaagacggaagaaaagcgcctgggatataaggtgtgggacgcaggagagaagaagtgggtgaaggcaaaggaaaaagaggatggggcagttattgataggaaacggtacgccaaggatatcatcttatttcactgcccaattacccttaaccgcgtgtccgaaagcaagacaaaaagagaaatggacgtggaaatacgcgaggtcttaagcagcacacctggggtccacatcatcggtgtggatcgaggagagaaacacttagcttactactccgttattgatcagaatggcaaaatcattgaaactgatactctgaacagcatcggtaaggatggccgcgggaagcccgtcgagtacgcttccaagttggagaaacgggcacaggagcgagaggcatcaaggagagactgggaggaggtagaggctatcaaggaccttaaaaaagggtacatctcccaggtgataaggaatctggccgacttgattatcaagcacaatgccatcatagtcttcgaggatctgaatatgaggttcaagcagatccgcggcggaatagaaaagtctgcttaccagcagctggagcgtgcgctgattgataagctctcctttctggtgaagaaaggagaggaggaccctaagcagacagggcatattctgcgcgcgtaccagctggccgccccagtcatcgcttttaaagatatgggcaaacaaaccgggctgattttctacactcaggccgggtacacaagtaagacatgccctgagtgcggataccgccgaaacattaagtgcctgttcgaaaacattgaacaggccaagaccctcattgaaaatctggagagcattaactacaataaaaaggaggacgtgtttcaaataagctattcactggaaaaactgtccagcaaagatcagaagaaagagaagaaggtcagcaacgagctttatgcaaagactctcaaaaaagacatttttatcctgacgactaaaaacgcccttaggtataagtggtacgatcgatattcagaaaaagctaaagtcgctaaacgaggaatcgacgaatacaagggggaggtgaacgagtcagaaactaagaagggggttgtcaaagagtttaacctcaccgagtacctgaagggtctgctcaagacctacgagatcgactatgaacacggcgggatacgggaacagattctcagtgtcgcacgtgggcgggagttctataaagacttcctgtacgccctcttcctgctgactgaaactagacacagcatcagcggccgcaatacagactatatccagtgtcctgaatgcgagtttgattctcgaaaaggcttcaaggatataaaggagttcaacggggacgctaacggcgcttacaacattgctcggaagggcatcatgattctggagaaaataaaacagtttaagaaagacaacgatggtaacctggagaagatgggatggggtgacctgtccatctccattgaagagtgggataagtttacccagaaagag

SEQ ID NO: 741 - DNA, 3825 bp, synthetic construct
  misc_feature 1..3825: note = Sequence codon optimized for human expression
  source 1..3825: mol_type = other DNA
atgggaaagaatcaaaattttcaggaatttataggtgtgtcaccactgcaaaagaccctccgtaatgaactgatccccaccgagactacgaaaaagaacatcacacaactcgacctgctgaccgaggacgagattagggcacagaatcgcgaaaagcttaaggagatgatggacgattactacagggacgtcattgacagcacactacacgcaggcatcgccgtcgactggtcctacttgttctcttgcatgcgcaaccacttgagggaaaactcaaaagaatctaagcgggaattggagcgtactcaggactcaatacgaagccaaatttacaacaaattcgccgagcgtgccgacttcaaggacatgtttggcgccagcatcatcacgaagttgctgcctacttacattaagcagaatccagagtattcagagcggtatgacgagagtatggagattctcaaattatatggtaagtttacaacctcgctaaccgactatttcgagacaagaaagaatatcttcagcaaagaaaagatcagctctgccgttgggtaccggatagtggaggagaatgcggagatctttctgcagaaccagaatgcttatgacagaatatgtaagatcgctggcctggacttgcacggccttgataacgagattaccgcctacgtcgatgggaagacactcaaggaagtatgctcagatgaggggttcgcgaaggccattacgcaagagggaatcgaccggtacaatgaggcgatcggcgccgttaatcagtatatgaacctgttatgtcagaagaacaaagcactcaaacccgggcagttcaaaatgaagcgccttcataagcaaatcttgtgcaaggggaccacgtcctttgatatcccaaaaaagtttgaaaacgacaaacaagtatatgatgccgtgaactcgttcaccgaaatcgttatgaaaaacaacgatttgaaacgcctcctcaatattacccagaacgtgaacgactatgatatgaacaaaatttatgtggcagctgatgcttactctacaatttcccaatttatttccaaaaaatggaatctgatcgaggagtgtctactggattattactccgacaacctgcctggtaaaggaaatgcaaaagagaacaaggtaaagaaggcagtcaaggaggaaacctaccgatcagtgagccagctgaatgaactcatcgaaaaatactatgtagagaaaactggtcagtccgtgtggaaggtcgagagttacatttctcggcttgcagagactatcactttggagctgtgtcacgagattgagaatgatgagaaacataatctgatcgaggatgatgataagatcagtaagataaaagagctgcttgatatgtatatggacgctttccatattatcaaggtgtttagagtgaatgaggtcctgaatttcgacgaaactttctattccgaaatggatgaaatctaccaggatatgcaggagatcgtgcctctgtataaccacgtgagaaactacgtgacacagaagccctacaagcaagaaaagtacaggctttatttcaatacacctacattggctaacgggtggagtaagaacaaagagtacgacaataacgccattatcctcatgagagacgacaaatactatctgggcattctgaatgctaaaaagaaacctagtaaacagacaatggccgggaaggaagactgtcttgaacatgcttacgctaagatgaattactacctgcttcctggagccaataagatgcttcccaaggtgtttttatcaaaaaaaggcattcaggactatcaccccagcagctacatcgtggagggctacaacgaaaagaaacatatcaagggcagcaaaaacttcgatataaggttctgccgcgacctaatcgactatttcaaggagtgcattaaaaaacaccctgattggaacaaatttaacttcgaattcagcgctaccgagacttatgaagatataagcgtgttttatcgggaagtcgagaaacagggctaccgcgtcgaatggacgtacatcaacagtgaggacatacaaaaactagaagaggacggacagctgttccttttccagatctacaacaaagacttcgccgtgggtagcacaggaaaaccgaacctgcacacactctacctgaaaaacctctttagcgaagaaaatctcagagatattgtgttgaagctgaacggggaggctgaaattttttttagaaagagctctgtacagaaacccgtcatccacaagtgcggatccatcctggtgaatcgcacatacgagatcaccgagtccgggaccacacgggtacagagtattcccgaatccgaatatatggaactgtataggtatttcaacagcgagaagcaaatcgagctctccgacgaagcaaagaagtacctggacaaagttcagtgcaataaagcaaaaacagacatcgtaaaggattacaggtacaccatggataagttcttcatacatctgcccatcaccattaatttcaaagtcgacaaggggaataatgttaacgctattgcccaacagtacatcgctgagcaggaagatctccacgttattggaatagatcgaggcgagcgcaacctgatctacgtgtcagtcatcgacatgtacggtcgaatattggaacaaaagagcttcaacttagttgaacaggtgagctcccagggtaccaaaagatattacgattacaaggagaagctacagaacagggaagaagagagagacaaggcccggaagagttggaagaccatcgggaagataaaagagctgaaggagggatatctgtccagtgtaatacacgagatagcacagatggtcgtgaagtataatgccattattgccatggaagacttaaactatgggtttaagaggggccggtttaaagtggagcgccaggtgtaccaaaaattcgaaaccatgttgatcagcaagctcaattacctcgcagacaagtcccaggcggtcgacgagccaggaggcattcttcgaggatatcagatgacctatgttccggacaatattaaaaacgttggccgtcagtgtggcataattttttatgtgcccgccgcttacactagcaaaattgacccaactaccggtttcatcaatgccttcaagcgagacgtggtgtctactaacgatgccaaggaaaattttctcatgaagttcgatagcattcagtatgacatagagaaagggctgtttaagtttagttttgattataagaattttgcaacacataaactgacactggcgaagactaaatgggatgtctacactaatgggacccggatccaaaacatgaaggtggagggtcattggctctctatggaagtcgagctgacgactaaaatgaaggagctgctcgacgatagccatatcccatacgaggagggccagaacattctggacgatctgagagagatgaaggatatcactaccatcgtgaatggcatccttgaaatattttggctgacggtgcagttgcggaattcaagaatcgataacccagactatgataggattatttcccccgttcttaacaacgatggagaattctttgatagcgacgaatacaattcgtacatcgatgcgcagaaggcgcctttaccgatagacgccgatgcaaacggcgctttttgcatcgccttaaagggaatgtatacagcaaaccagattaaagagaattgggttgagggcgagaagctcccagctgattgtctaaaaattgaacacgcctcatggctggccttcatgcagggcgaaagggga

SEQ ID NO: 742 - DNA, 3840 bp, synthetic construct
  misc_feature 1..3840: note = Sequence codon optimized for human expression
  source 1..3840: mol_type = other DNA
atggaggagaaagagctggggaaaaatcaaaacttccaggaattcattggcgtctctccacttcagaaaaccttacgtaacgagctgatccccaccgaaactacgaaaaaaaatatagcccagctggatctcttaaccgaggacgaagtacgggcgcagaatcgagagaagctcaaagagatgatggacgattactaccgtgacgtcatcgactccacactgcgcggagaactgctgatagactggagctacctcttcagttgcatgaggaaccacctgagtgagaattccaaagagagcaagcgtgagctggagaggacgcaagattccgtgcggagccagatccatgacaaattcgctgaacgagctgattttaaagatatgtttggagcaagtattatcacgaagctgttgcctacttacataaagcagaattcgaagtatagcgagcgatatgacgagtccgtcaagattatgaaactgtacggcaaatttaccacttccctgaccgattacttcgaaactagaaaaaatatcttttcgaaggaaaagatatccagcgctgtgggatatcgaatcgtggaggaaaacgcagagatttttttacagaatcagaacgcttacgacaggatatgcaaaatagctgggctcgatctgcacggcttagacaacgaaatcactgcctatgtggacggcaagacattgaaggaagtgtgctctgatgagggcttcgcgaaagtgatcacacagggcggtatagaccggtataacgaggccataggcgcagtgaaccagtatatgaacctcttgtgtcaaaagaataaggcactgaagcccggccagttcaaaatgaaacggctgcataagcagattctctgcaaagggacaacatctttcgatatacctaagaagttcgaaaacgataagcaggtctatgacgcagtgaactcatttacagagattgtgaccaagaacaacgatttgaagaggctgctcaatattacccagaatgctaatgactacgacatgaacaaaatttacgtggtggcagatgcttattcgatgattagtcagtttattagcaagaagtggaatctcatcgaagagtgtttgttggattactactccgacaacctgccaggaaaagggaacgcaaaggagaacaaagtgaaaaaggccgtgaaagaagagacataccgatctgtgtcccagcttaacgaggtcattgagaagtattacgttgagaaaaccggccagagcgtgtggaaggtggaatcctatatctctagtttggccgagatgatcaaactagagctctgccacgaaattgataatgacgagaaacacaatctgattgaagacgatgagaaaatcagcgaaatcaaagaactgctggatatgtatatggatgttttccacatcatcaaggtctttagagtaaacgaagtgttgaattttgacgagacattctatagtgagatggacgagatctatcaagatatgcaagaaatcgtgcctctgtataaccacgtccggaattacgtgacacagaagccctataagcaggagaaatacaggctctacttccatacccccacccttgccaatgggtggtctaaaagcaaagaatacgacaacaacgccatcatactagtacgcgaggataaatactacttggggatactgaatgcgaagaaaaagcccagcaaggagatcatggctggaaaggaggactgttctgagcacgcttacgccaaaatgaactattatctgctgcccggtgccaacaagatgctccctaaggtttttttgtctaagaaagggatacaggattaccatccatcctcatacattgtcgagggatacaatgaaaagaagcacattaagggatctaaaaattttgacattagattctgtcgcgaccttatcgactatttcaaggagtgtattaagaaacacccagactggaacaaattcaattttgagttcagtgccacggaaacttatgaagatatttcagtgttttacagggaagtggagaaacaaggttaccgcgtcgagtggacatacattaacagcgaggacatccagaaacttgaggaagatggacaactgtttctgtttcaaatctataacaaagactttgcggtggggagcacaggcaaacctaaccttcataccttatacctgaaaaacctgttctcagaagagaatctgagagacattgtactaaagctaaatggcgaagcagaaatcttttttaggaagtcctccgtccaaaagcccgtcattcacaaatgcggatccatcttggtaaaccgcacgtacgagatcaccgaaagcggcaccacaagggtccagagcatcccggaaagcgagtacatggagctctataggtacttcaatagcgagaaacaaatcgagctttccgacgaggccaagaagtatctcgataaggtccagtgcaacaaggccaagacggatatagtgaaggattatagatacacaatggacaagtttttcattcatctaccaatcacaatcaactttaaggttgacaaaggaaacaatgtgaatgccatcgctcaacagtacatagcggaacaggaggacctccatgttattggcatcgacagaggcgagaggaatctcatttatgtttcggttattgacatgtacgggagaattctggagcagaaaagcttcaacctggtagaacaggtgagcagccaaggcacaaagcggtactatgattataaggaaaaactgcagaatcgcgaagaggaacgagacaaggctcggaagagttggaaaaccattgggaaaatcaaggagctcaaggagggctacctgagtagcgtgatccatgagatcgcccagatggttgtcaagtacaatgcaatcatcgctatggaggacttgaactatggtttcaagagaggtcgcttcaaggtggaacggcaggtttatcaaaagttcgaaacgatgctaatctcaaagctgaactaccttgcagataagtcacaggcggtggatgaacctggtggtattttacggggataccaaatgacctatgttcccgataatattaagaatgtgggaagacagtgcggaattatcttttacgtccccgcggcttatacctcaaagatcgatccaaccactggtttcataaatgctttcaagagagatgtggtcagcactaatgatgcaaaagaaaactttctgatgaagttcgatagtatacagtatgacatcgaaaaaggtcttttcaaattttccttcgattataagaatttcgcaactcacaaactgacccttgccaagacaaagtgggacgtttacactaacggcacccgcattcagaacatgaaagtggaggggcattggctctcaatggaagttgagcttactaccaagatgaaggagctgcttgatgattcacacatcccgtacgaggaggggcagaatatcctggatgacctgagggaaatgaaagacattactactatcgtaaacgggattttggagattttttggctcactgtccagttacgtaattctagaatcgacaatccagattatgaccgcatcatatcccctgtactgaacaacgatggagaattctttgacagtgacgagtacaattcatatatcgatgctcagaaagccccgctcccaattgacgccgacgccaatggcgccttctgtattgccctgaagggcatgtacaccgccaaccagatcaaggaaaactgggtggaaggcgaaaaactccctgcagactgtctaaagatcgagcacgcctcatggcttgcctttatgcagggggaacgggga

SEQ ID NO: 743 - DNA, 3864 bp, synthetic construct
  misc_feature 1..3864: note = Sequence codon optimized for human expression
  source 1..3864: mol_type = other DNA
atggtaggaaacaagattagcaactcctttgattcttttacaggaataaacgccctgtcaaagactctccggaacgagctgatccccagtgactacacgaagcgccacatcgcagagagtgactttatcgccgctgacacaaataaaaacgaagaccagtatgtggcaaaagagatgatggatgactactatagggattttatcagtaaggtcctggacaatttgcacgacattgaatggaaaaacttattcgagctaatgcacaaggcaaagatagataaatcggatgctacatccaaagaactgatcaagatacaggacatgctgaggaaaaagatcggcaaaaagtttagccaggatccagaatacaaagtaatgctgagtgctggcatgatcaccaagatcttaccaaagtacatacttgagaaatacgagactgaccgggaggataggctagaagcgataaaacggttctatggttttacagtttattttaaggagttctgggcaagccgtcagaatgtgttttccgacaaagctatcgccagtagcatctcataccggattatccatgagaatgccaagatttatatggacaacttggatgcttacaatagaattaagcaaattgcttgcgaagaaatcgaaaaaatagaggaggaggcctacgacttcctgcagggtgaccaattagatgtcgtttataccgaagaggcatacggaagattcatctctcagtccgggatcgacctgtacaataacatctgtggtgtaatcaacgcccacatgaatctttactgtcagtcaaagaaatgcagccgatccaagttcaagatgcagaagctacataaacagattttatgtaaggccgaaactggatttgaaatccctctgggattccaagacgatgcccaggtgatcaatgccattaacagcttcaatgctctgattaaggaaaaaaacattatcagccggctccgcacaatcgggaagtcaatatcattatacgacgtgaacaagatttacatcagttcaaaggcttttgaaaatgtctccgtgtacatcgaccacaagtgggacgtgatcgccagttcgctgtataagtattttagcgagattgtcaaaggcaacaaggataaccgagaagagaaaattcagaaggaaattaagaaggtgaaatcatgtagcctgggtgacctccagcgccttgtcaactcttactacaagatcgactctacctgcctggaacatgaggttacagaattcgtgaccaagatcattgatgaaatcgacaattttcagatcaccgatttcaagttcaatgacaaaatttcactgattcagaacgaacagattgtgatggacatcaaaacttatctggacaagtacatgagcatttaccattggatgaaatcctttgtgattgacgagctggtagataaggacatggagttttatagtgagctggatgagcttaacgaggatatgtctgagattgttaatctctataataaggtgcgtaactatgtcacccaaaagccctactctcaagagaaaataaagctgaacttcggcagtcctactctcgcagatggctggagcaagtcgaaagaattcgataacaatgcaatcattctcattagagatgaaaaaatttacctggcaatcttcaatccccggaacaaacccgctaagaccgttatcagtggccacgacgtgtgcaactcagagactgattataaaaagatgaactactatcttctcccgggcgctagtaagacacttcctcacgtgttcatcaagtcgcgtctttggaacgaatcccacggaattccagatgagatcctgaggggatacgagctcggcaagcacctaaagagctccgtgaactttgatgtggagttctgctggaagcttattgattattataaagaatgtataagttgctatcctaattataaagcatacaatttcaaatttgctgatactgaaagctacaacgatattagcgagttctacagggaagttgagtgccaaggttacaaaatcgattggacctacataagctccgaagatgtcgaacagttggatagggacggccagatctacttgtttcaaatctacaataaagacttcgcaccaaattctaagggtatggataacctccacacgaagtatctaaaaaatatcttttccgaggacaatcttaaaaacatagtgataaagctgaatggcgaggcagaattgttctacaggaaatcttcagttaagaagaaggttgagcataaaaaaggaacaatactggttaataaaacttacaaggtcgaagacaacacagagaattctaaggaaaagcgggttataattgagtccgttcctgatgattgctatatggagttagttgactattggcgcaatgggggcatcggaatcctgtccgataaggccgtgcagtataaggataaagtatcacattacgaggccactatggacattgtaaaggatcgccgttataccgtggataaattctttatccatctccccatcaccattaattttaaggccgatggcagaattaatatcaacgagaaagtgctgaagtatatcgcggaaaacgacgagttgcatgtcattgggatcgaccggggggagcgaaatctgctctacgtgtctgtgattaataagaagggtaaaatcgtcgagcagaagtcttttaatatgatcgagagttatgaaacagtgacaaatatagtcaggcggtacaactataaggacaaactggtcaacaaagagagcgccaggacggacgcccgcaagaactggaaggaaataggaaagattaaggagatcaaggaaggatatctcagccaggtaatccatgaaatttccaaaatggtgcttaagtataacgctattatcgtgatggaggatttgaactacgggttcaagagaggcagattccgcgtggagcgacaagtctaccagaagttcgagaacatgttaatctccaaactggcctatttggtggacaagagtcggaaagcagacgagcccggtggggtcctcagagggtaccaactcacgtacatcccagattctctggaaaaattggggtcccagtgtggcattatcttctatgtgccagcggcctacacctcaaaaatcgaccccctgactgggttcgtaaacgtctttaattttagagaatacagcaacttcgaaacgaaattggactttgtgcgatcactggactccatacgctacgataccgaaaaaaaactgttttccataagctttgactatgataacttcaagacacacaataccacactggcgaagaccaagtgggtgatataccttagaggagagaggatcaagaaagagcacaccagctacggctggaaggacgacgtgtggaatgtggagtcaaggataaaagacctgttcgactctagccacatgaaatatgacgacgggcacaacctgattgaggacattttggaactagaatccagcgtgcagaagaaactgattaatgagctgatcgagattattagactcaccgtgcagctacgcaactccaagtctgagcgatacgacagaaccgaggccgagtatgatcggatcgtcagccctgtaatggatgagaacggccgcttctatgattcggaaaactatatattcaatgaggaaactgagctcccgaaagacgccgatgcgaatggggcctactgtatcgcgctcaagggcctgtataatgtcattgctatcaaaaacaactggaaagagggggaaaaatttaatagaaaattgctcagcctcaacaactacaattggttcgactttattcagaatcggaggttc

SEQ ID NO: 744 - DNA, 3717 bp, synthetic construct
  misc_feature 1..3717: note = Sequence codon optimized for human expression
  source 1..3717: mol_type = other DNA
atgaaagagttcactaatctgtacccagtgagtaagacactccgcttcgagctgattcccgataagcggactaaagagtacctggagcacagcgacctgattgctaaggatgaacaccgcgccgagtcatacaaaatcgtaaagaagatcattgaccgctaccacaagaagtttattgacgacgtactgagtacaacaaagctccagtacaccaaggaaggtaagctaaactccttggaggatttttacttcttatacaccaacagcaataaaacagatgccgataaaaaagccctggacaaagtgaaggaattgctccgaaaacagatcgtcgacgcactcaagcaggataaccggttcaagcgaattgacaaaaaagagttgattagagaggacatcctgcaagtgataaagcctgaggaacgtgcactgatagatgagtttcaggactttaccacatactttaccggcttccatgagaatcgcaaaaatatgtactcagcagaggcccagagcacagccattgcctatcgtttgatccacgagaatctgcccaaattcgttgacaatatagccatcttccagaaaatcctcaaaagcccgatagcggagaatctgcccaccctctataaggacatggaagaatacctaaatgtcaatagcatcgaagaaatgtttatgctagactactatagcgatgtgctcacccaaccgcaaatagaggtgtacaacgctattattggcgggcgaacacttgaggatggcactaagatacagggcgtgaacgagtttgtgaacctgttcaatcagcagcagacctctcgcgataaccgattacctaaactgaaaccattgtttaaacagattctctccgacaaggaggcgatctcctggctccccgaggaatttgaaagcgaccaacagctgctgaacgctgtaagagagttctatatctccttgactaataacgtgatgcagcagctcaaagaactccttttgaacctgcctaactacaacttggacaagatctacatccccaacgatctggccctgacggatatcagccaagcactctacggagactggagtgtaatcaagaacaggatctacgaggacttcaagaatgagaaccctcagaaaaaaaatgaaaagacagaaaagtacgaggagagaattagcaagttgatcaaggaaaaagacatcttcaatattggctacctgaattcgtgcctcaccaatcaaactaaggatgtgtgcgcacacttcacctcactgggggcagtgaacacagaagctaagcagacggagaacatattcctgcagattgagaacgcttatacagacgtgcgggaattgcttgaatacgattatccacaagataagaatttaagtcaagatcggattcaggtgaataagctgaagacgctgctggacgccatcaagaatctgcagcacttcgttaaacctcttcttgacactgaaaacgaagctgaaaaagacgaaagattctatggcgagttgagtgtgctgggcgaagaattgaacaggataactcccctctataacaaggtgcgaaaccggatgacacgcaagccttattcgatcgaaaagtttaaactgaatttcgagaacagtaccctgctggacggctgggatgtcaacaaggagagagacaacagctgtgtcatactcaggaggaacggtctgtattttctggcgattatgagaaaagacagcaacaagatattttcagacgctccggttggggatggcaaggattattatgaaaaaatggagtataaactgctccctggagcaaacaaaatgttgcccaaagtattcttttctaagtctcgcattgacgaattctgtcctagtccaagtttactggagcactacgagcaggggacccacaaaaagggggaaaaatttagcctgaaagattgccatgagctgattgacttcttcaagaccagcatcaaaaaacataaggattggagtcaattcaattttaaattctcaccaacagagagttatgaagatctgtctggtttctacagagaggtggaacagatgggttataaaatcacctacaagaacatcccagttagctatatcgacaccatggtgtcaaaagggcgcctctttctttttcaaatttacaataaggatttctcaccatattccaagggcactcctaacttgcacaccctttattggaagatggtgtttgatgagcagaatctcgcggacgttgtctataaactaaacggacaagctgaaatcttctacaggaagaaatcccttaatctgggcaaggtgacccatcctgctaaccaggcgatcaagaacaaaaaccagttaaatcccaaaaaagagtcctcgtttaagtacgatctcatcaaggataagaggttcacggtggacaaattccagttccacgtccccattaccatcaacttcaaggccatcggtcttgggaatataaaccagtccgtcaataagtatatccaaaacagcccagacctgcatatcattggaattgacaggggcgaacggcatctgttatatattaccgtcatcgatagcaaggggaatattaaggaacagttttctctgaaccagattgtgaacatgcacaaagggaacacttacgagacggattatcatgaacttctggacaagcgggaggaggagagacaaaaggagcgtcagtcttggaatactatcgagtccatcaaggaactgaagcagggctacttatctcaggtgatccataaggttgtgactttaatggtgaaatataaggccattgtcgttctcgaagatttaaatatgggttttaagcgggggcggcagaaagtagagtcctctgtttaccagcagttcgaaaaggcactcatcgagaagcttaattacctagccgataagcagcaaaatcccaacgagtatggcggactgctaaagggatttcagcttaccaacaaatttacatcttttagggagatgggaaaacagaacggatttctcttttacattccagcttggaacacttctaaaatagacccagttaccggattcgtcgaccttctccatcccaagtacgagtcagtggagaaagcccgcgctttcatctgtaaattcaagaacatccgattcaacgaaaacaagggatggtatgagtttgtttttgattacaatgattttacaactaaggctgagggcacgcagacaacctggactctatgcacacagggctccagaattgagacattccgtaataaagaaaaaaattctagctgggacaatagagaaatcaatctgaccaaggagtttcactcattgtttgaaagctgcggaattgcccccaacgaaaacctaaaagaagtcatcgccaaacagactgagaagtccttctacgagaggcttctaaaactgctgaatcttaccctccagatgaggaactccataaccggaacggacatcgactacctgatttcacctgtggcaaatactgacgggaagttttacgattcccggaactgtaaggacagcctgccggagaatgccgatgccaatggggcctataatattgctaggaagggtctgtgggtagtcagacagatacaacaggccgcaaatacagacaaggtccagttctccataacgaataaggagtggctgaacttcgcacaaacaaaaccatatctcaatgat

SEQ ID NO: 745 - DNA, 3783 bp, synthetic construct
  misc_feature 1..3783: note = Sequence codon optimized for human expression
  source 1..3783: mol_type = other DNA
atgaagcagtttactaacctttatcagcttagcaagaccctgcgcttcgagctgaaacctataggaaaaacgaaggagaacatcgaaaagaacggtattcttgaacgggataaccagagggatatcgcatacaaggctgtcaaaaaagtgatcgacgaataccacaaggcattcatagagatgatgctgaacgactttgaacttcagtacgagctacttgaagaataccatcacctctaccatatctccaacagcgaggagcctaagaaaaaagagaaactgcaaaagatccaagagaatctccggaagcaaatcagcgatagattcaccaagtcagaacagtacaagaggctctttggcaaagaactcattaaggaggacttgagcgaattcgtaaagacaccccagtttgggaattacattagagcccagaaaggagacgagtacaccgacgaacaagtacgacagattcaggagcgaacgcttgaagacatcgatcagttcaaagacttcacaacatacttttccggtttccatcaaaaccgccagaatatgtatgtggccgacgacaaagctaccagcatcgctcaccgcatgatcgatgagaacctgccaaagttcatagacaatatgaaaacatttgctgaaattgccgagtccgacgtggctgagcactttgctgatctctataaggagatggaaagctatctcaacgtctcagatatacgggagatgttccaattggattactttagcatggtgctaactcagaaacagatcgacgtttataacgcaattattgggggcaagactctagccgatggcacaaagatccaggggctgaatgagtatgtcaatctgtacaatcaacagcaaaaaaagaaggaagataggctcccgaagctgaaacccttattcaaacagattttgagcgagcgcaacgctattagctggttgccagaagagtttaaggatgataatgagatgctgcagtctatcggcaaatgctaccaggacctcaatactcttgtcttcggcaagctgaagaccctccttgaaactttgaacgacttcgatctagataatatctacctccctaacgacctgcagctgaccgacatagcccagaagcactatgggagttgggccgtgattaacaaggcaatcgaggaggacttgaagactgtgaacccacaaaaaaagcgggaatcaggggaaaagtatgaggagagaatcgccaagctgctgaaggcaaatgatagctacagcatcggatatatcaactcattactgaaagatcggatggaggactttaagccactggaggcttacttctctaatatcggagccgaagatgacggtaagcaacagaaactgagccactttgcccgcattgagaatgcttacacagaggcaaagtcactgttaaccgctgagtatccggatgacaagaagctgtctcaggacaaggcaaacgtggaaaagattaagaatctgctggacgccattaaggaccttcagcgattcgtcaagcccctgctaggttgcggcacggaatctgacaaagatagtcatttttatggcgagttcacacctttgtgggaacaactcgatcagatcacacccctttataacatggttcggaatcgaatgacccagaaagcttactccgtcgaaaagattaaaatcaacttcgataattcaactctgttggccggctgggacctaaacaaggaggcagacaatacatgtaccctgctaagaaaagatggtctgtactacttagtcatcatggacaagtctaacagtcgtgtcctgaaggcggagaatctgttgagcgacggggactgttatgagaagatggagtataaactgttgcccggcgcaaataaaatgcttccaaaggtgtttttttccaaatcccgaatcggcgaattccagccctcagagtctgttttagagaattataaaaacgagacacacaaaaagggagacaacttcaacatcgaccattgccatgagctgataaatttcttcaaaaaatcgatcggaaagcatgaggactggtccaagtttggatttaaattttcggacacccgcacttaccaggaccttagtggcttctacagggaggtagaacagcaggggtataaaattactttcagaaatgtgtcagtggattacatcaaccaactggtcgacgaaggcaaaatatacctatttcagatctataacaaagacttcagcccatatagtaaaggaacccccaacatgcataccctctactggaaaatgctttttgatgagaggaacttagcggatgtggtctacaaactgaatggcgaagccgaggtcttctttagaaaaaaatctgtaaaggtggaacgtcccacgcatcctgccaatcagcctatcgccaataaaaatgcccagaacaataagaaggaatccacttttgcctacgacctcattaaggataggaggtatacagtggacaaatttcagttccacgtgcctataactatgaatttcaaggccgctgggttgaataatattaacccattggtgaatgagtatctgaaaatgagtaatacaacccacattatcgggattgacagaggagaacggcacctcttgtacctctctctgattgatctcaagggcaatatagtagagcaatattccctgaatgaaattgggaatatctacccaacgaactacagggatctgctgaatgcaaaagaaaagcagcgggacgaagctcgtaggagttggcagaccattgagaacattaaagagctgaaagagggatacatgtcgcaggttgtacacaagatcgcccagctgatgctgaaatataacgccatcgtcgtgctggaagatctcaacttcgggtttatgcgggggcgccagaaggtggagaagaacgtgtatcagaagtttgagaagatgctcattgacaaactcaactacctcgtggataaaaaacttgatgcggatgccatgggaggagtgctgaacgcttaccagctgacaaacacttataaggttttccacgatcaatacaaaaaacaacaaaacaccattggtaaacaatgtggtttcttattctacatccccgcatggaacacttccaagatggacccaactactggcttcgttaacctcctagataccaggtacgagaacatggagaaagctaaggcattctttggcaagtttgattcaatcagatatgacgcccttaaggattggttcgagttcgcgtttgattataataatttccacaacaaggcagaagggacgagaacacaatggacattatgtacctatggaacacggatagaaaccaaaagagacgccgcacagaacaataacttcgtttccaccgaagtggaccttacacagaagtttaaggccctgtttgccgaaaagcagatcaaccccagcgggaatttgaaggagcagatctgcaaccagaccgatgcctccttctttaagagtctgctgaacttactgcgcctcaccctgcagatgaggaactctatcacgggtacagaaaccgattacctcatttctccggtgcagaatgcgaatggagagttttacgacagccgaaaatgcgacgctaatctgcctgagaacgctgatgcaaatggcgcgtataacatagctcgcaagggcctgtgggttatagaacagatgaagcaggccgacgatctctccaatattaaactcgcgataagtaacaaggaatggttgagatctgcccagaagctggag

SEQ ID NO: 746 - DNA, 3753 bp, synthetic construct
  misc_feature 1..3753: note = Sequence codon optimized for human expression
  source 1..3753: mol_type = other DNA
atgaaggacttaaaacgctttatcgggatatacccagtgagcaagaccttacgctttgagctacgaccagtgggaaagactctagagtggattgagaagaataaggtgttggaatccgacgaacaaaaagctgaggactaccctaaagtgaaaacactgatagacgaatatcataaagtatgcatccgggagtcgctaaaagatgctcacttcgattggatgccccttagactggccctcgaaaagtaccagaaatccaaatcagacgaggataaagccgccctggagaaggaacaggccgtcatgaggaaacaaattgccaccgcaattaaggagtttagacactataaagagctgacggctccaacaccacaaaagctgatcgacaatgtcttccccggcatctacgagagcgatgctctgaagtccttcaatcgctttagcgtctacttccgggggttccaggagaatcgcaacaacatctactcagcagaagccatttcaactggcgttccttatagactggtgcacgacaatttccccaaattcctcgccgacatcgaggtgtttggtaacataaaggcaaactgccccgaagtgattgagcaagcagcgacagaactgcaaccaatcctggaaggcgttatgcttgaagatatcttcacaatagacttctataattcattgctgacccaggacggaatcgacttcttcaaccaggtactgggggggacagccgaagaggacaaacaaaagtatcggggaataaatgaatttagcaacctgtacaggcaacagcatcccgagcttacggcaaaaaagaaggcattgacaatgattcccctctttaagcagattctgtccgacagagacaccttatcatacatcccacagcagatcgagagtgaacagcagctcattgaactcctgaatcagttctactcccatattactgcctttgaccacaacgggaagaccgtcgatgtgttgaaggagctcactaaactgacaggaaatatcaacaactacaaccccgacggcatttacttgtctgcgaaatcgctaaccgatgtttcccagaagctgttctccaagtggaacattattacagagaggttaagtgaagaagccatcaagcggtttggggatgtgtctattaccaaaaacaaaaagaagatcgatgcttatctaagtaaagacgcttacgccctgagcgagatcccgctggataacgagcactccctgtccatgttttttgcagaattaccgaaaaatatcgagaacgttggaagcaattggcttcagttcatggagtggtgtaaaggagagtcaaagcagttgttcctgaataacgctgacggcaccgaaattgtgaaaaacttccttgactcgatcatggagatactgcataggtgttccgtccttgtggtttccgtggaacatgatctggataaggacttttataacgactttctgccactctacgctgaactggaaaatgccgtgatggtgtataatcgggttcgaaactttctgaccaagaagccatctgatacaaagaaatttaaactgaattttggcgtcccaagcttgggcgacggctgggatcagaacaaggagcgcgacaataaggccatcatcttgttcaaagatggtaagagctatctcggcatcatgaatgctaaagacatgcctatgattaaagagcgtaatgaaagcacaccaagcagctacaagaagatgatatacaaactgctcgctgaccccgctaaggattttcctcacactttcttctcaaaaaaaggcatcgacacgtatcatccttcgtggtatatccttgatgggagagaacaaggtaaatataagaagggcgaaaccttcgataagaagttcatgagggatttcatagacttttataaggatgctgtggcaaagcatcctatatggtctaagttcaatttcgtatactctcccacagagagctacgaagacatcggcgcattcttcaacgaggtgagtaagcaggcctacaagattcgctttagctacattgaggagagtcaaatcaacgagtggattaataacggacagctttatcttttccaattgtataacaaagactacgccgaaggagccagaggccgaaaaaacctgcatactctctattgggagtccatttttagccctgaaaatctctctaacattgtgctcaagttgaatgggcaggcagaactgttttatcgtccacagagcatcaaacagcctgtcactcacaagatgggctctaagatgctgaaccgccgcgataagagtggaatgccgattcctgaggcaatctaccgctcactgtacctctatttcaacagtaaaaagactgaaagtgaactcaccctggtggagaagtcatacttagatcaagtagttgtgaaagacgtaactcacgagatcgtgaaagacagacgatacactaagcctgagtttttctttcacgtccccattacctttaatgtgaacgcggacggaaatgagtacatcaatgaacaggtgatggagtatctaaaagacaaccccgatgtaaatatcatcggaatcgatcggggtgagcggcatcttatttacctcacgctaatcaatcagagaggagaaattctgaagcagaagaccttcaacatggtggggaactacaactatcacgccaaattagagcagagagaacaggagcgcgatcaggcaaggcgttcctggcagagtatcggacggatcaaggaattgaaagagggcttcctgtctgcagttatccacgagatcacaatgatgatgattgagaacaatgccatagtcgtcctcgaagatctgaattttggattcaaaagggggagattcaaggtagagcggcaagtctaccagaagttcgaaaagatgctgatcgataagcttaattatttgtctttcaaggatcggaagacagacgatgctggcggcatcctccgaggttatcagctagcgcaacagtttacatcattccagcgtctcggtaaacagagcggttttcttttctacataccagccgcttatacatctaaaatcgatcccgtcacggggtttgtgaaccactttaactttaacgatataactaatgcagagaagcggaaagcgttttttatgaaaatggagcggatcgagatgaggaatggcgacattgagttcgaatttgactacagaaagtacaagacttatcagacggactaccaaaacatttggaccgtcaattcttccgggaagaggattgttatgaggctggatgagaatggccgaaaaaagatgaccgactattatcctacccaggagatcgttagggcctttaaagaaaagggtatgcttctgaacgaaggggccgatattaaggctctgttagccgacatagacgcgagtcctatgaacgctagtctctacggggtgatgttctacgccttccagaagacactccagatgagaaactccaactcaaccaccgaagaggattacatactcagccccgtggcacagaacggtaagcagttcaacaccgataccgaggccaataaaggcagggacactaatggcaattggattagcaagctgccggtcgacgccgacgcgaacggagcttatcacatagccctgaaagggctgtacctgttgatgaacccgcagactaagaaaattgagaatgagaaatggttgcagtttatggtgcaaaaaccctataatgat

SEQ ID NO: 747 - DNA, 3729 bp, synthetic construct
  misc_feature 1..3729: note = Sequence codon optimized for human expression
  source 1..3729: mol_type = other DNA
atgaagactttcaatgacctgacaggtttatattccctttctaaaaccctgcgatttgagttgaagcccgtgggcaagactaaagacaacatcgagactaagggcatcatcgcccaggacgaaaaacgggctgaggagtataaaaaggtgaaggacattatcgacagataccacaaaaagttcattgagatgtgcttggccaatctcaagctgaaaacaatctccgatggtaacaacgatagcctgaaggaatatgtcactctggcaagcaaggcaaataaggacgagaaagaggacaatgattttaaagatgtgaagactgcccttaggaaacagatcgtcgatgcctttaagaagggtgggagctacagcgacctgttcaagaaggagttaatccaggtccatctgcccgatttcgtgaccgatgaacaggaaaagcagatggtcgaaaacttcggcaagttcaccacctactttaccggctttaacgaaaacagacagaacatgtatagcgacgaagagaaatccacatccatcgcataccggctgattcatgagaatcttcccatgtttattgacaacatcaagtcattcgccaaaattgccgagcacgaggacatcgattttctgcccgacatagaaaacggtttcaaggaggagcttaagcggctgaaagctcagtcaatctccgaagtgtttgatttagcaaatttcaccaataccctgacacagtcccagattgattcatataacgcaattatcggcgccagacatgacgagaacggggacaaggtgcaaggcataaaccagtatgtgaatctgtacaatcagaaaaacaaggacgctcgtttgccattgttaaaacccctgtacaagatgattctgtcagacagaggagccctgagctggttgcccgaagagtttgctacggacgaagagatgcttgctgcgatcaatgagacgcacggaaaccttaagaatgtcatgacagacgtgcgcaaactcctccagaatattgactcctacgacactgaacacatttatattgccaatgataaggggctcactgacatatctcaacagatctttgggcagtatgatgtgtatacctctgctattaaagctgagctgagagactcgatcacaccaagcgctaaagagcgcaaagacccagaactactcgaaaagcggatcaatgacatattcaaggcaagtaagagtttcagtatcgagtacctgaatagtcacgtggatagtgacaaaaccatccagagctactacaaggagctgggcgcctatgaccgtaacggagaacagaggattaacctgttttcgcaaatcgagctagcatacgtcgacgcacatgacgtactgctcggcaaacacacaaacctgaatcaaagcgaggactcaataaaaaaaatcaaggccctgctcgacgcctacaaagccctcttacacttcatcaagcccctgcttggcaatggcgatgaagcagataaggacaatgaatttgatgccaaactgcgcgctatctgggacgaactagatatcgtgacacctctgtacgacaaggtccgcaaccggctaacccggaagccttactccactgagaagattaagttgaacttcgacaatgctcaactcctgaacggctgggatatgaacaaagagccagattgtacatccgtccttctcagaaaggacggccaatattacttagcgattatggataagaaatcgaaccacgcattcgatatcgacgaactgccttgcaatggggagtgctacgataaaatggattataaactcttgcctggagctaataagatgctacctaaagttttttttagcaaaagccgcataaaggagtttgccccaagcaaggaaatttgcgacgcgtatcagaaggggacacataaaaagggcgccaattttagcattaaggactgtcgcagactgatagatttcttcaaggattccatagctaagcacgaggattggtccaagtttcccttcacttttagtgatacgtctacctacgaggacataagtggcttttacagagaggtggaacaacagggatacatgctcggatataggaaagttagtgtttcttttattaaccagctggtcgatgaagggaaactctacctgtttcagatctggaataaggatttttcagagtattcaatgggaactccgaatatgcacacgctgtactggaagatgttgttcgatgaaaggaatctggccaatgttgtctacaaactcaatggtcaggcagaggttttctatcgtaaaaagagcctggatctaaacaaaaccacaatccatcgggccaatcagcctattgctaataaaaatatgcagaacgagaaacgagaatcaacattctgttacgacattgtgaagaacaggaggtacactgttgataagttccagttccatgtgcctataaccatcaactttaaggccaccggatcagacaatataaatgccagcgttctagacgtaataaggaacaacgggattgaacacattatcgggattgatcgaggagagcgacacttgctttatctgtccctgatcgatatgaagggaaatatcgtgaaacagatgactttgaatgatattatcaatgaatataaggggaacacctacaccactaactataaagaacttctccaggcgcgagagggagacagaaaagaggctcgtcagaattggcaaaaaatcgagaacattaaggagctcaaggagggttacctttctcaggtggtacatgttattacaaagatgatggtggagtataaggccatagtggtactggaagacctgaatggggggtttatgagaggcaggcaaaagattgagcgccaagtgtatgagaaattcgagaagatgctgatcgataagctgaattactatgttgacaaacagagggacgccaacgaaaacgggggcttgttacacgcctatcagttggccagtaagttcgatacattcaaaaagttaggtaagcaatccggctgtttgttttacatccctgcgtggaatacttctaagattgacccagtgacgggtttcgtaaatatgctggatacccgctatgagaacgctgataaagcacggaacttcttctcaaaattcaaatccattaattataacgcagacaaaaactggttcgagttcgtgattgacgattactctaagtttaccgataaggcaaaggacacacgaacagactgggtactgtgcacttacggtaccaggatcaagacctttcggaaccccgaaaaactgaaccagtgggataacaaggaaatcgtcctgaccgacgagttcaaaaaagtgttcatggaagctggcatcgatataaacggaaacctcaaggaagcaatatgtacacttaccgagaagaagcatcttgaatctctgatgcagttgatgaaactcctcgtccaaatgcgcaacagcgagacgaatagcgaggtggactacctcctgtctccagtcgcagatacggaggggcacttctacgattccagaaactgcggagacaacctcccgaaagacgcggatgccaacggagcttataatatcgcccggaaaggcctatgggctgtgatgaagatcaaagccagcaagccgcaagaaaaccttaagctcggcatcagtaacaaagaatggttacagtttgcgcaggaaaaaccatacctcaacgat

SEQ ID NO: 748 - DNA, 3615 bp, synthetic construct
  misc_feature 1..3615: note = Sequence codon optimized for human expression
  source 1..3615: mol_type = other DNA
atgtattatcaggggttaacaaaactgtacccaatctcaaagaccattcggaatgagctgatcccagtggggaaaacactcgaacacatccggatgaacaacattctggaagctgacatccagcgcaaaagcgactacgaaagggtgaaaaaactcatggatgactaccacaaacaactgatcaatgagtctctgcaggacgtacatctgtcctatgtcgaggaagctgcagacttgtacctcaatgcatctaaagacaaggacattgtcgacaaatttagcaagtgtcaggacaagttacgcaaggagattgttaacctcctaaagtcgcacgagaactttcccaaaatcggcaataaggagatcataaagctcctgcagtccctgagcgataccgagaaggactacaatgcgctcgattcttttagcaagttttacacgtatttcacaagctacaacgaggtgcggaaaaatctatatagtgacgaagagaagtcctcgacagccgcttatcggctaataaatgaaaatctccccaaattcctggataacataaaggcttactcaatcgcaaagtcagccggggtgagagctaaagaacttactgaggaggaacaagactgcctgtttatgactgaaacgttcgagagaaccctgacccaagacgggatcgacaactacaatgaactgatcgggaaactcaacttcgccattaacctttacaaccagcagaataacaagctgaaaggattcagaaaggtgccaaaaatgaaggagctgtataagcaaatccttagtgagagggaagccagcttcgttgatgagttcgtggatgatgaggcactactgactaacgtggaatcattcagcgcacatatcaaggaattcttggagtctgactccctgtccaggttcgcggaagtgcttgaggaaagcggtggcgagatggtttacattaagaatgatacctctaaaacaaccttcagcaatattgtgttcggatcttggaacgtaattgacgagcgcctcgccgaggaatatgacagcgccaacagtaagaagaagaaggatgagaagtactatgataagcgccataaagagcttaagaagaataaaagttattcggtggagaagattgttagcctcagcaccgagacagaggatgttatcggcaagtacatagaaaaattgcaggcggatataattgctataaaagaaacacgcgaagtgtttgaaaaggtggtgcttaaggagcatgacaaaaacaagtctcttaggaaaaacaccaaggccatagaggctatcaagagcttcctggacacaataaaggatttcgagcgggacatcaaattgatttcaggaagtgagcacgagatggagaagaaccttgcggtctatgcagagcaagagaacatcctgtctagcatcagaaacgttgattccctgtacaacatgagccgcaactatctcacccagaaaccgttttccaccgaaaaattcaagctgaatttcaatagagccactctgctcaacggatgggacaagaataaggaaaccgataatttggggattctgctggtgaaagaaggtaagtattatttgggaataatgaacactaaagccaataagtcattcgtaaacccaccaaagcctaaaaccgacaatgtgtaccacaaagttaactataagctcctcccaggacctaataagatgctcccgaaagtgttttttgctaagagcaatctggaatattacaagcctagtgaagatctgctggccaagtaccaggccggaacacataagaagggcgagaattttagcttggaagattgccactccctgatctcctttttcaaggactccttggaaaaacatccggattggtctgaatttgggttcaagttttcagacactaaaaagtacgacgacctgtcagggttttacagggaagtcgagaaacagggctataagattacctacacagatatcgacgtggagtatatagattccttagtggagaaggacgagctgtacttgtttcaaatttacaataaagacttctcaccctacagtaagggcaattacaacttacacaccctctacttgactatgttgtttgatgagagaaatctacgaaacgttgtttataaattaaacggcgaagctgaggtattctatagacccgcctccattggaaaggatgaactgataatccataaatcaggagaggagatcaagaataagaatcccaaacgggccatcgataagcccaccagtacatttgagtacgatattgtcaaggaccgaagatacaccaaagataagtttatgctccacatcccagtgactatgaactttggcgtcgacgaaacgcgtcgattcaatgaggttgtgaacgatgcgattaggggtgacgacaaggtacgggttattggaatagatcgcggagaaagaaatttgctttatgtcgtcgtcgtggactccgatggcactatcctggagcagatttcccttaattcaattatcaacaacgagtactcaattgaaaccgactaccacaaactacttgatgagaaagagggagatagggaccgtgcccgaaaaaactggaccactatcgaaaacatcaaagagctgaaggaaggctatctgtctcaggtcgtaaatgtgatcgcaaagctcgtactgaagtatgacgctattatctgtctggaagacctgaattttggcttcaaaaggggtcgtcagaaggtggaaaaacaagtgtatcagaagttcgagaagatgctgatagataagcttaactatcttgtgattgacaaaagccgctcccaggaaaatcctgaggaagtggggcacgtcctcaacgccttacagctcacatccaaattcacatcttttaaggaactggggaaacagaccggcatcatttactatgtgcctgcttatctgacgagcaagatcgatcccactaccggtttcgccaatttgttctacgtgaaatacgagtctgtcgagaaatctaaggacttttttaatcgctttgacagtatatgttttaataaagtcgctggttatttcgaatttagttttgattacaagaacttcacggatcgggcctgtggcatgaggagcaaatggaaagtgtgcactaacggcgagcggatcattaagtaccgaaatgaggagaaaaattcttctttcgacgataaagtcatcgtgctgactgaggagttcaagaaactgttcaacgaatacgggattgcattcaatgactgcatggatcttacagacgccatcaatgctatcgatgatgcctccttttttaggaagctcactaagttattccagcagacactgcaaatgagaaacagtagtgcagacggctcccgtgattatattatcagccctgtcgagaatgataacggtgagtttttcaactccgagaaatgcgacaaatcaaaacccaaagacgctgacgcgaacggggcattcaacatcgcacggaagggcctctgggtattagagcagctgtacaacagttcttcgggcgaaaagctaaacctggccatgacgaacgcagaatggctagaatacgcccagcagcacacaatt

SEQ ID NO: 749 - DNA, 3732 bp, synthetic construct
  misc_feature 1..3732: note = Sequence codon optimized for human expression
  source 1..3732: mol_type = other DNA
atgaaggatctaaaacagtttatcggaatttatcccgtgagtaaaactcttcgattcgagctgaaaccaatcggcaagactcaggagtggattgaaaaaaaccacgtgttggagcacgactggaagcggacagaggattacccaaaggtgaaggaaatgattgatgcctaccacaaactgtgtataggaaaaagcctgaagaacatggatttcgactgggtgccgctgcgggacgcaattgagagaaataggcaggagaagtcggatgggagcaagaaagctctggaggccgagcaaacaaaaatgagaaacaagatacatgaccaactatccaaattcgagcactataagaagctcaatgcggacaccccgagcctgttgatcaaccatattctgcctcaggaggacgccttagaaagcttcaaaaaatttgccacctatttcgaaggatttcaaaagaaccgcaagaatatttatagcaaggaggcaatctcaaccggtgtcccttatcgtctcgtgcacgacaacttccccaagttcctggccaatattgaggtgttcgaaaacctgcaggagctgtgccccgaggtgattcaacaggcagcaaccgagatggcgccattcctgcaaggggtaatgatagaagacgtgttcaccgtgggcttttataacaccatcctgacccaagacggtattgatttctacaaccaaatacttggcggagtggtgaaggatgagagacactatcagggaatcaaccagcttacgaatctgtacagacaggctcatccagaccttacggctaatcggcgctctatgaccatggttcctttattcaagcagatactgtctgatagagagactctgagtgacatctcaaagcccatagaatcagaagagcagctaatcaagacagtgacaagcttttatagaagaatcactgactttaccctcaatggcaactgcgtcaatatcattagtgaactggctgcacttgctcaatcgttgaacacttacaatcctgaagggatcttcatttccgctaaatcattaaccgatgtgagtcacacactttatggtcactggaacaaactaaatgagaaactgtacgaaaaagccgttgaggcaatcggcgatatccaggtggctaaaaacagaaagaaagtggaggcttacctgaacaaagacgcttacacgctctctgagctgagcttcggcgacgacatatctctggctcagtacttcacatccatatccgccgcaagtggggcaacaaatagcctgtgggtgcaatttcagtcctggtgtaaaaccgcagaaaagccaaagtatgttcataacgaggccggaacggagctggtaaagatgctccttgactctattatgaacgtacttcataagtgctctgccctcgtcgtaagcatggaaaacgacctggataaggacttttataacaagttcctccctctgtacgctgagctagaaaatgttattctcgtctacaatagggtcaggaattttctcacccagaagccaagctcaacaggcaagattaagttgaagtttgatattccttccttgggggccgggtgggggatcaacaaggaaaagaagaataaggcaatccttttgtttaaagatgggcggagctaccttggcattatgaacgtcaaaggtaccctggacttcgacgataaagctgaacccggcgagccaacatataaaaagatggtctgcgttaatcacagtaagccttacatggatctccccaatagtttttttcgacagacaggcattgacaagtataagcccagcgagaggattttaaagatttatgaggcctttaagaaagattccaagagcgtcgatattaaagaagtgaggggactcatcgactattacaaggaggcaattactcgaaacgaagactggaatagcgtttcgttcacctactcacctaccgagacatacgaaaccatcgatgacttttacaaagaggtggccaaacagtcctaccaggtgagctttaaagacatatcacagaaactggtggatgagtgggtcgagaatggccagctctacctgttccaactctacaataaggattacgccgaaggcgcgcatggacgcaaaaacctgcatacactgtactgggaatccctcttcaccgcagagaatctgagcgatatcgtgatcaaattgggctcaaatgccgagctgttttaccgcccgcaagctattaagaagcctgtgaaacatgaagtaggaactaaaatgctgaatcggcgagataaaagcggcatgccaatacccgacgccatatacctttccctctaccaattctacaacggcaagaaagaggaagccgaattaacagacgaggagcgggcctatattagtcaagtaatagttaaggatgtgcagcacgaaatcattaaggaccgccgctacactaaacagtttcactatcagtttcatgtccctatcgtgttcaatgcaaacgcgaacggaaaagtcaagttcaacgacaaagttatggattacatccaggataaccccgatgtaaatattattgggattgaccgtggtgaacgccacctcatttacctgaccctcattaatcagagaggggagatcttgaagcagaagacttttaatgtggtgggcaactataactatcaggaaaagttaaagcagcgcgagaaggaacgtaaaaacgcccagaagagttggcaagacatagagagaatcaaggatcttaaagagggtttcttgtccgctgttgtgcacgaaatcgcccagatgatgatcgaatataacgccatcgtggtcttggaagatctcaatcgaggatttaaaagggggagatttaaggttgagcgtcaggtctaccagaaattcgagaaaatgcttatcgacaaattaaactacctgtcatttaaggacagggaaatcgccaacgaaggtggaattctgagggggtatcagctcacagagatgacactgaattactccgacatcggccggcagacaggtttcctcttctatatcccagccgcctatacgtccaagatcgatcccgttaccgggtttgtgaatcacttcaacttgaatgacatcaccaacgccgagaagcgcaaggccttcttgatgaaaatggaacggatggaaatgaaaaatgggaacgtcgaatttgaattcgactaccggaaattcaagacgtttcagaccgactaccagaacgtgtggactgttaatactagcggaaaaaggataatctttgacactgaaactcgaaaagcgaaagacgtgtatccaaccaaggagatcgtccaggcatttgcgaatcggggaatcgtcctggaggagggaatggatctgaaagcgatcatcgccgaagtagagcccgattctaagaacgccgcgttcttcaggtcactattctatgcattcgagaacacattgaggatgcggaatagtaatgctgagactcaggaagactacatcctgtctccggtggctatcagcggcaaacagttctgtactacagatgaagcaaacaagggcaaggatgccaacggtaattggttatccaagctcccagtcgacgcagatgccaacggggcttatcatatagctctaaagggcctgtacctgctgaataaccctcaaacgaagaaaatcgagaatgagaagtggtttcagtttatgattgagaagccctatatcgag

SEQ ID NO: 750 - DNA, 3732 bp, synthetic construct
  misc_feature 1..3732: note = Sequence codon optimized for human expression
  source 1..3732: mol_type = other DNA
atgaagaccttcaatgatctcacagggctgtatagtctctcaaagactctcaggttcgaactcaaaccggtgggaaaaactaaagacaatatagaaaccaagggcatcattgctcaagacgagaagagagcagaggaatacaaaaaagtgaaagatattatcgatcgataccacaagtcattcatcgatatgtgcctagcgggccttgtccttcgaaccaccagcgacggtaacaatgattctctggaagattatgtcgccctcgcctcaaagtcaaaccgggacgagaaagaagagaaggacttcgatgacgtgaagaccgcgctgcggaaacaaattgtagacgcatttaaaaaaggcaacagctacagcgacctgtttaaaaaggagcttattctgaatcacctccctgatttcgtgacggatgagcaggaaaaacaaatggtggagaacttctctaagttcaccacctactttacaggctttaacgaaaaccgcaagaacatgtactcggacgaggagaaatcaacggctattgcctaccgcttgattcacgaaaatttgcccatgtttatcgacaatatcaagagcttcgcacgaattactgagcaggaggacatcgacttcattgctgatatagaacatagttttagagaggaactgaagggacaatctattacaaaaatgttctcacttgagaatttcacaaacactttaacgcagggccagatcgagctatacaataagatagtcggcgggcgggtggaggacagtggagccaaaaagcagggcattaacgagcacgttaacctctataatcaaaagcataaggatgcccgtttgcccctgctcaaaccactatacaagatgattctgtcagatagggtcgttctcagctggcttcccgaggagtttgcaaccgacgaggagatgttagatgctattaatgaaacacataataatctgaaagacgtgctggtcgacgtgcgggaattactgcagaatattgacaactatgatactgaacacatctacatcgccaacgataaggggttgagtgacatcagccagcagatcttcggacagtatgatgtatacacgtcagctataaaggcagaattacgcgacagcattacccctagtgcaaaggagcgtaaagaccccgagctgctggataagcgcatcaataatatttttaaagcatccaagtccttcagcatcgactatctcaatagccacgtggagttaggaaagaccattcagtcctattacgcccagctgggtgcctacgacagaaacggagagcagcggattaaccttttgtcccaaatcgacctagcgcatgtggacgcccttgaagttctatccggcaaacatactaacctgaatcagagcgaggagagcatcaagaaaataaaggctctgcttgatgcctataaagccctgcaacatttcataaaacccctgctgggaaacggcgacgaggcagataaggataatgaatttgatgctaaactgcgggcgatttggaacgagctggatataataacacctctgtacgataaggtgagaaacagactcaccagaaaaccatactccaccgaaaagatcaagcttaatttcgataatgcccagctgctcaatgggtgggacatgaacaaagaaccagactgcactagcgttctcctgaggaaagatggtcaatattatctagcaattatggataagaaaagcaaccacgcctttgatacagacgacttgccttgtgatggcgagtgctatgagaagatggagtataagcagatggccctgcctatgggtatgggtgcctttgtgcgcaagtgctttgggacggctaaagcgctcggatggcagtgtccccgccatctaatgacctctgatggcaaaataatcatcaaagacgaagaagctcagaaggtgctgcctgaactgatcgactgctataaatccttccttgacatctacgagaaagacggtttcaaatataaaaccttcagctttaagttcaagccaagttcagagtatgaaaagctgtcgcacttctttgccgaagtgccgtcccagggatacaagtgtagtttcaggaacgtttctgtcagctttatcaatcagctggtggatgaagggaaactgtatttatttcagatctggaacaaagatttttctgaatactctaaaggcacaccaaacatgcataccctctattggaagatgcttttcgatgaaaggaacttagcaaacgtggtgtataaattgaacgggcaagcagaagtcttttaccgtaaacggagcctggatcttgacaagacaactattcaccgggccaatcagcccatcgcgaacaagaatatgcagaatgagaaaagggaatccactttttgctatgatattgttaagaacagacgatacaccgttgacaagttccagttccacgttccaattactatcaacttcaaggccactggaggggacaatgtgaacgcttccgtgctcgacgtcatcaggaataacggtattgagcacatcatcggcatcgatagaggggagcgacacctgctgtatctgtcactgattgacatgaagggaaacatcgttaagcagatgaccctcaacgacattatcaacgagtataaggggaatacatacacaaataactataaggaactgctgcaggccagggagggtgaccgcaaggaggccagacagaactggcagaagatcgagaacatcaaggagcttaaggagggttacctcagccaggtagtacacgtgattaccaagatgatggtcgaatacaaggctatcgtcgtactggaggatctgaacggcggcttcatgcgggggaggcaaaagatcgaacgacaggtgtacgaaaaatttgagaagatgctcatagataagctcaactattacgtagacaagcagaaggacgccaatgagaatggagggttgctgcatgcttaccaattggccagtaagtttgatacatttaagaaattaggaaagcagtccggatgtctattctacattccggcctggaatacctctaagatagaccctgtcactggcttcgtgaatatgctggacacacgctacgaaaacgccgataaagcacgcaactttttctcgaaatttaagtccatcagctacaatgccgacaagaactggttcgaattcgtgataggcgattactccaaattcaccgacaaagcaaaagacacacggacagactgggttttgtgtacctatgggaccagaataaagacatttagaaatcccgagaaactgaaccagtgggacaataaggaaattgtcttaacaaatgaatttaagaaggtgttcatggaagctggcatcgacataaatggcaacttgaaggaggcgatctgcacgttgactgaaaagaagcatttggagtccctcatgcagcttatgaagctgctggtccaaatgcgtaattctgagactaacagcgaagtggactacttgcttagtcccgtagctgacacggagggccacttttatgattctaggaattgtggagataacctgcctaaagacgcagatgcaaacggggcctacaacattgctaggaaaggcctgtgggctgtgatgaagatcaaagctagtaaaccacaagagaatttgaaactcgggatctccaataaagagtggctgcagtttgcccaggagaaaccatacctcaatgat

SEQ ID NO: 751 - DNA, 3984 bp, synthetic construct
  misc_feature 1..3984: note = Sequence codon optimized for human expression
  source 1..3984: mol_type = other DNA
atgaagactatagataagttctgcggccaggcgaatggctattcaaggtcgattaccctgagaaacagattaatcccaatcgggaagacagaagagaatattcaaaaccagaacctgctcgacaatgacatcatacgttctcgcgcctacgtggaggttaaaaaaatgattgacgatttccatagatccttcattgaagatgtgctgtctaagattgagttgaaatgggacgatctgtaccatcaattcgacctgttccagaatgagaaggataaacagaagaagaccatcatcaagaaagaaatggaaacttgccagggggagatgcgcaagcaaatagtcaaaaagttcaaagatgatgatcgattcgataagctgttcaagaaggaccttctgactgaatttgtgccaaccgtcataaagaacgacgagcttggtacaattagtgacaagcagacggctctgaacgtgttcaaggggttcgcaacctacttcaccggctttcatcagaaccggcagaacatgtacagtgaaaaagctcagtctacggccataagcaacaggatagtgaacgaaaatttcccgaaattctatagcaacgtgaaagtgtttgagtatctacaggataatttccctgagatcatcagccaaacagagcaatcactctctgtactccttaaggggaagagacttgcggatattttcacagaagatggattcaacgccgtcctatcccagagggggatcgacttttataacactatcatcgggggcgttgccggagaagcaggtacccaaaaacttcagggcctgaacgaggagattaacctagctcggcagcagttacccattgaagagaaatacaaactcaaatgcaaaatgtctgtcctgtataaacaaatcctcagtgatcgatccacaaccagctttatcccagcaggatttgagagctcaaacgaagtgtacgaatctatcaagcagtttaaagaactcagcttgaatacaatcattagcgaggctaagaccctgttcgagaagtctgactataacctggaacacatctatgtgaccgctaagggtgtgacagaattctccttgaagctgtttgggaactggagtatactgcacgacggcctgtttttaattgagaaggacggagccaaaaaatccctctccgaaaagcagatagaaactttacggagggaaattgctaagcgtgattactccctgtccgaattgcagaatgcctacgagatgtgggcgaaggaaaatgacgttgcggttgagaaaaccgtcaagaactactttaagattgcagagttgagggctaatgaaaagactaaagagaagtgtttcgttgagatcctgaagaagatagagtctgcatttgagaagatagacttcgagaaacaggagaatctgatcaaagagaaggagagcgctacgccaatcaaggatttcttagatgaagtgcagaatttgtatcactacctgaagctggttgactatagaggggaggagcaaaaggacaccgatttctacagcaaatacgatgagatcctacagaccctgagcgaaatcgcgcctttgtacaacaaggtgaggaattttgttacaaagaaacctaacgagatcagaaaaatcaaggtgatgttcgattcaagtagctttctgaacggctggggaaccgagtacggaactaaagaagcacacattttcatcgactcaggaaaatactatctgggcatcgtgaacaagaagcttgacaaaaaagatgtggaatccctcaaagccgacggggaacacatggtcagtaaggtaatttatgatttccagaagccagacaacaaaaatacgcctagactctttatcagaagcaaaggggagagttttgcaccagctgtctccaagtacaacctgcccatcactgatattattgatgtgtacgataaagggctttttaaaaccgagtacagaaaaattaatcccgaggagtataaaaaggctctcgaaaagcttattgactactttaagttagggttcagtaggcacgacagctataagcattataatttttcctggaagaaaacgtcagactatgccgatatcgctgatttctacacggacacaataaaatcttgttatcagctgaaatttgagaaggtcaattttgactgcctgctgaatctcagtaattcaggaaagctcttcctgttccagatctacaataaagactacagtacaggcaaggacggaggaaatggctccaccggtaagaagaaccttcatacactctattgggaaaatctgtttagcgaggaaaacttgcgaaacgtttgtttgatgcttaatggtaaagccgaactgttctggcgggatgccaaccccaatgtgaaggcagtctgccacaaaaagggatccatcctaatcaacaggactacctcagatggcgagacaatcccggaagagacatatcaggagatctacaaatacaaaaacccggataagcaggaaaaagacttcaaactgagcgatgcagccaaggagctcctggacagcggtaaggtggtgtttaaagacgccaagtttgatattatcaaggaccaccacttcacacaaaaaacttacctctttcactgcccaattaccatgaactttaaagcccccgaaattaaacgcaaattcaatgagaacgtacagcaggtcctcaaaaataaccctgatataaaaataatcgggctagaccgcggcgagcggcatctcatatacttgagtctgatcaatcagaagggtgagattgagttgcaaaagacccttaacctcgtggagcaagtgcgaaacgataagactgtgtctgtcaactatcaggagaagttggtgcagaaggaaggtgagcgtgataaggtacggaagaattggcaaatcatctccaatattaaggaactcaaggagggctatttatcaaatatcgtgcacgagattgccaagctgatggtggacaacaacgccatcgtcgtcatggaggacctgaatctgggcttcaagcgcggtcgcttcgccgtcgagcggcaagtatatcaaaaattcgaaaacatgctcattgaaaaactgaactatctggttttcaaggacaaggaaaacacagaacccgggggagtgctgaatgcataccagttgacagacaagacagccaacgtttccgatatcggcaagcagtgcgggtggatattttatattccagctgcctacacttcaaagatagaccccaagaccggcttcgcaaatctgttttacacggccggcatcaataatatcgaaaaaaagaaagcattctttgataaatttgacagtatcaggtacgacagaaaaaccgacagcttcattttttcttttgattactcaaagtttggagacaacactgacttctacaaaaaatgggaggtatactccaagggcgagcgatttgtgttcgacaagcctgaccactggaagagctataaaaaaattgaaacttcgtccaagaagtcagagaaggcagtaatatgtgtgaatcctactgaggaactcaaggtactgtttgataaacaggacattaattggaattctgagaagaatttcattgacctaatccataccgttcagggcaaaagggagaactgtgtgttctatgacggactataccggagctttaccgccattttacagatgcgcaactcgaatgccaaaaccggggaggactatatcatttctcccgtgatggcggacgatggtacattttttgattcccgcgaggaattcaaaaagggcgagggatctaaactgcccgtcgatgcagatgctaatggagcctatcatatcgcccttaagggccttagccttctgaaacggtttgacgtcgcttcggaggcggaactcaagaagttcgatatgaagatttctaacgctgactggttcaagtttgcccaggaaaaaagctacgctaaa

SEQ ID NO: 752 - DNA, 3672 bp, synthetic construct
  misc_feature 1..3672: note = Sequence codon optimized for human expression
  source 1..3672: mol_type = other DNA
atgaagaaaatagacaactttgtggggtgctatcctgtttcgaagactctgagatttaaggcaatacctataggcaagacacaggaaaacatcgaaaaaaaacggttggtggaggaagacgaggtgcgagccaaagactataaagccgtgaagaagcttatcgacagataccatcgggaattcatcgaaggagtcctggataacgtgaagctggacggacttgaggaatattacatgttgtttaacaaaagtgacagggaggagtccgataacaaaaaaatcgaaatcatggaagaaagatttagacgagtcatcagtaagtcctttaagaataacgaagagtataagaaaatatttagcaagaaaattatcgaggagattctgccaaactacatcaaggacgaagaagagaaagaactggttaaaggcttcaagggcttctacactgccttcgtcggctatgcacagaaccgagagaacatgtactctgacgaaaaaaagagtactgctatcagctatcggatagtcaatgagaacatgcctcggtttatcacaaatattaaggtctttgagaaagctaaaagtatcctggacgtggataagatcaatgagattaatgagtacatcttaaacaatgactattacgttgacgactttttcaatatcgacttcttcaactatgtactgaatcagaagggcatcgatatttataacgcgatcattggagggatcgttaccggggatggtcgtaaaattcaggggctgaacgagtgcataaatctctataatcaggaaaacaagaagatccgcttaccccaattcaagcccctctacaagcaaatcttaagcgagagtgaatccatgtccttttacatcgacgagatcgaatcagacgacatgctgattgatatgctgaaggagagcctgcaaatcgactctactattaacaatgccattgatgatttgaaggtgctctttaacaatatcttcgactacgacctcagcggcattttcataaacaatggtttgcccattaccacaataagcaatgatgtctatggacagtggtcaaccatatcagatgggtggaacgaaagatacgacgtgcttagtaacgccaaagacaaagagtccgagaaatactttgaaaagaggcgcaaagaatataagaaggttaaaagctttagcattagtgatctccaagagttaggggggaaggatttgagtatttgtaagaaaattaacgaaatcatctctgagatgatcgacgattataaatcgaaaatcgaggagatccagtatctcttcgatatcaaagagctagaaaaaccactcgttaccgatctgaataagattgaactgattaagaatagcctagatggactgaaacggattgagcgctacgtgatcccgtttctgggcactggcaaagaacagaatcgcgacgaggtgttctatgggtacttcataaagtgcatcgacgcaattaaagagattgacggagtgtacaacaagacgcgcaattacctcactaagaagccatactcaaaggataagttcaaactttattttgaaaaccctcagctgatgggaggttgggacagaaataaggagtccgattaccggtccactctcctgaggaaaaacggaaaatactacgtggctattatcgataagtcttcttcaaactgtatgatgaatatagaagaggatgagaacgacaactacgaaaagataaactacaaactgctgcccgggccaaataagatgctacccaaagtgttcttcagtaagaagaacagggagtactttgcccctagcaaggagatcgaacggatctactccacgggaacctttaagaaggacaccaatttcgtgaaaaaagactgtgagaacttaattacattctacaaggactccctggacaggcatgaagactggtctaaatcatttgatttttcattcaaggagtcgagcgcctaccgcgatatctcagagttttacagggatgtcgagaaacagggctaccgagtgtctttcgacttgctgtcctccaatgcggtgaacaccctcgtcgaggaaggtaagctgtacctgttccaactctataacaaagacttctcagagaaatcccacgggatccctaatctgcacaccatgtactttaggtccctcttcgacgacaacaacaagggcaacatacgtctgaacggcggcgctgagatgttcatgcggcgagcctcactcaacaagcaagatgtgaccgtgcataaggctaaccagcccataaaaaataaaaatttacttaatccaaaaaagacgactaccctaccatacgatgtttacaaggataagaggttcacagaagatcagtatgaggtccacattccaatcacaatgaataaggtgcccaacaacccttacaagatcaaccacatggtccgcgaacagcttgtaaaagatgataacccctatgttattgggatcgatagaggcgagagaaatctgatttatgtggtggtagtggacgggcaaggtcacattgtggaacagctctctctgaatgagattattaacgagaacaacggaatctccatcagaaccgactatcataccctgctggatgcaaaggaaagggaacgggatgagtctagaaagcaatggaaacaaattgagaatatcaaagagcttaaagagggatatattagccaggtcgtgcacaagatttgtgagctcgtagagaaatacgatgcagtcattgccttggaggacctgaattcgggatttaagaactcccgcgtgaaggtggaaaaacaggtatatcagaagttcgagaagatgcttatcactaagttgaattatatggtagacaagaaaaaggattataacaagccaggtggcgtgctaaatggctatcagttgacgacccagtttgaatctttctccaagatgggcacccagaatggcattatgttttacatccccgcgtggctgacttcaaaaatggatccgacaaccggatttgttgatctgctcaagcccaaatacaagaataaggcagacgctcagaagtttttcagccagttcgatagcatacgttacgacaatcaagaggacgctttcgtgttcaaagttaactatacaaaattcccacggacagacgccgactacaacaaggaatgggagatctacacaaacggtgaacgtatcagggtatttcggaaccctaaaaaaaataatgagtacgactacgagactgtcaacgttagcgagcgcatgaaagagttattcgactcttatgatcttctttatgacaagggggaactaaaagagacaatctgcgagatggaagagtctaagttttttgaagaactgataaaattgtttcgcctcaccttgcagatgagaaatagcattagcggtaggacggatgtcgattatctgattagtcctgtcaagaattctaatggatacttctataatagtaacgattataagaaagagggcgcgaagtatccgaaggacgcagacgccaatggggcctacaatatagcccgaaaggtgctctgggcaatagaacagttcaaaatggccgacgaagataagctggataagacaaaaattagcatcaagaatcaggagtggcttgagtatgctcagacacactgcgaa

SEQ ID NO: 753 - DNA, 4002 bp, synthetic construct
  misc_feature 1..4002: note = Sequence codon optimized for human expression
  source 1..4002: mol_type = other DNA
atggaacacagtctgcgggatttcaccggcctatattccttgtctgaaaccctgtctttcgagctccgtcccctggactccgagttcaaccccaagccggctgatcgggccctagctgatatgaaaaaatatctggatgaagatagaaaacgagcggcacagtatgcctctattaaagccatcttggacgaagagcacaaaaagctgatcgagagggtgctttcagacgtgcctggagccataggacgattaaaaaaccgaaaggcattcgccgagatcctgagtgacgatggatctgggatcaggtggtcccgcctgaaagaagccgaaggggcagctaggaacgcaaagacggaaatcagggaggctaaaaagactagaaaggctacgtcagaggcggacggagcaattaccacagaaactaaggaggaagcgaggtttaaagatctgcagaaaaagttcagagagttgatagctgccctgctggacacggatgagaagaaaaaatctctcctggaggctaccccgtcgaagtatatcaaaggcatgctcagcgaatttggtgatgcccttcagcctgacaccagagaggctctgaataccttcgagaagtttgcctgttacctcaagggctttcaagagaacagggctaacctctatgcagccgagccacaagtcaccgcagtggccaaccgggtggtgaatcagaacttcccaaagttcctcactgcgtgcaggatcatggcacatattcaggaacgctacccagaaatcatcagcgaagccgagaggaaccttgccgcgaatctcaatggcgcgccgctaatgtccagatttcagcccgacgcattcgacttgtgtctggctcagagcggaatcgatgtgtacaacaccatcctgggtggattcaccctgaaagacggcaccaaaatccagggaatcaatgagacaatcaatctctataggcagcagcacgccgatgctgcaaacgacaggaatctcgctcccatacccgcactgtacaaacaaatattgagcgaccgagacactctctctttcatccccgaaatgttcgactccgacagagctgtgtgcgacagcattttgaagttcctagaaagtttaaagtgggagacgatgcaaagtgacataacttccctcctggactccctggacgctgatgacccaggggtgttcgtcgagaagagcgaactgaccaggatcagccataagttgttcggcgattggtcccgcatcagggccgctctcgaacgctgtgccgaaactaagttcactaggaaggcagatagggaaaagtggcttaataaagacatctactcattgagagagctgaacgagctcgacttcaaactctctgaggaagacgatatcgctgaagtgccggcgattacagatttttggcgtggcgcccatcgagctgaggtgtttagcgccgtcgagtccgccatccaagctgttcttgacacactccattccgaagcataccctgagggcgacactgaaccacgactaagggagaacgagaatgacgtggctgcaattaaggacctgctcgacgcacttactggcctcctgcacctcctgaagcctctgcaggcagaaagtcctgacgctaatatggtcttctatgccgattttaatgacttctacgccaggctggatccagtcatccctctatacaatcgggtacgcaactacattacccagaagcctagcgagcagaagaaggtgaaactgatgtttaactgcagcaccctggcagacggctgggatcggaacaaagaatcagataacaatgccgtcattctactgaaggacggaaattattatttagccgtgattcaacctgcccagaagcagacagacgggaaacgggaaagaaaggtcaaatttgccgattttgagactgacggtgccgggccttgctttagaaaaatggtgtacaaatacctccccggcccaaacaagatgctgcctaaggtcattttctctaaatccaatagagatatcttcgatcctcccgcagaactgttacgcaaatatgaggccggtatgcataagaagacgtcccccaattttgatctgaagttttgtcgcgagctgattgacttcttcaaagtctgcattgcgaagcacgaagattggtctaagtttggatttcagtttgctgacacagccaagtataacggcatcgatgagttctacaacgagatcagcgctcagggttacaaaatgaccttcgctcccatacccgtccagactgtttcagaccttatcagggacaacaaaattctgttgttccagatttataataaggatttcgcccctggcagtactggcagacagaataaattcacattatactggaagacacttttcgaggaagaaaacttaaaggacgtcgttttcaagctcaatggcgaggccgagctgttcctgcgtgatccatcagtaagaaaaccgttcgtccatcggaaaggtgataaacttgtgaaccggaccacaaaagatggagcgccagtgagcgagtcggtccatgcagaactttgcaaattcgccaacggcaggataggctacgacggcctctccgctgaggcccgcggaatttgggacaatggtcaagcggttgtgaaaacagctacacatgacattacaaaagaccgtcggtttacaaccccaaaattcctgtttcacgtacccatatccatcaacttcaaggcccctgatgccaaggcgggcatcaaccaaaaggttcttgattacctgagagacaaccccggggttaaggtcatcggaattgaccgcggagagcgaaacctcgtgtacttaagcctgatagggcgcaacgggagaattcttctgcaaaagtcatttaataccgtgccccagagacgcagtgaccggacagttgaatttgactatcacgcaaaactggatcagcgggaaaaggagcgggacgctgcgcgcaaaaactggacatcagtgaatcggataaaagacttgaaggcagggtacctctcacaaattgtgcacgagattgccaagttgatggttgagcacaatgccgtcgtggtaatggaggacctgaacttcgggtttaagcgagggagatttgctatcgagaagcaggtttaccagaatttcgaacgggcccttatcactaagttgaattacctcgtgtttaaggacgctgagacacccgccgacgccggatatgttctgaaggggctgcagctcgccaacaagttcgagagttttgaaaagttgggaaagcaaagcggcttcttattctacgtgccggccggttacaccagcaaaatcgatccagccaccgggtttgtatctttatttcagttcgggaagtatacatctgcagaggctcgtaaagcctttctgggtaagttccgctctatccgatttgacgcagcccgggatgccttcgcatttacattcgactatcgagattttcccgcccagggcaaggagctgcccggcaagagtgagtggacggtgcgttcagtaggtgagagaattgtgtacagcccaaagaagcgcgaatcgtttgtgtgtaaaccaactgaaataatcttggatgcgttggccaaacggggaattagaccagaggacgggtttgacttgctacggctaatcagggaaacggatggagccgatcgcgccaatgcagcgttttttaacgctgtattcgaggcatttaagcttaccgttcagatgagaaactccgatgccaaaataggggaggattatattctgagcccagtgatgagcgcagatggtaccttctttgatagtcgcaaggctcctgccgatatgcctcgtgatgcagatgctaatggcgcttatcacattgctatgaaggggctttacctgctgcagaaccggtttactgcaggcaccaaaaaagcagatctgaaaatttctaatcaggactggtttgatttcattcagaatcggcacgcccgc

SEQ ID NO: 754 - DNA, 3738 bp, synthetic construct
  misc_feature 1..3738: note = Sequence codon optimized for human expression
  source 1..3738: mol_type = other DNA
atgaagcagttcaccaacctttaccctgttagtaaaaccctgaggtttgagctgcaaccagtgggcaaaacaaaagagaatattgaaaaaaatggaatcttactgcgggatgagcaacgcgccgaggattataagcgggttaagctcctgattgacgagtaccacaagcagtttatcaaacaacggctgtggaactttaagcttccaatgatcaacaatggtcatcatgactccctcgaagaatatcaggccttatatgaattgtctaagagagacgacgatcaggaggccactttcacagaagtaaaggacaatctgcggagcatcatcgctaagcagctaaccgtgggatctacctatgaaaggatttttaaaaaggagttggtgcgcgaagatctgattgaattcctggaagatgagaaagataaggaaatcgtccgccagttcgccgacttcaccacctacttcagcgggtttcatgagaaccgcaaaaatatgtattctgccgaagagaaaagtacggcaattgcttacaggctcattcaccagaaccttcctaaatttatggataacatgaaggcatttgctaaaattaagcagaccagcgtggctgagcactttactgatatctatgagggatggaaggaatatctgaatgtggaaagcctggaagagattttctctctcgactatttttcagaaacacttacccagccccacatcgaggtctacaattacatcatcggtaagaagatcctagacgatggaaccgagattaagggaattaatgagtacgtgaacttatataaccagcagcaaaaagacaaatcacagcgtctgccgtttttggtgcctctgtataaacaaatattgtccgaccgcgagaaactttcttggctaagcgaggagtttgactccgacgagaagatgcttgcggcgatcaaggaatcctacaaccagctgcatgacctcctgatgggcgaggagaatgagagcttacgatccctgctgtcccatattaaggattatgacctcactcagatcaacatcacaaacgaccttagcctaaccgaaataagtcagcacttgttcggccattacgacgtcttcagcaatggcattaaagaccagttgagaataatcacacctcgcaagaagaaagaaagtgatgagaactttgaggaccggatcagtaaaatctttaaaacacaaaaaagcttctcgattgacttcttagataagctgcctcagcctatcatggaggatggcaagccaagatgcattgaagactactttatggcactaggggccatcaatacaaatacaactcagaaggaaaacctgtttgcccagatagagaatgcctatgaagatgctcgggcaatcctgcagatgaaggagacaggagacaccctttcccagaacaagtcggccgtcgcaaaaatcaaggcactgctggataccttgaaggatttgcagcactttattaagccactgctgggaagcggggaagagcaggaaaaagatgagctgttctacggctcgtttcagatgatgtgggatgagctcgacgcaattacgccactgtataataaagttcgaaactggcttacgaggaaacccttttctactgagaagataaagctgaacttcgacaacgcccagctcctagctggctgggacctgaataaagaaattgacaacacctgtacaatactgagaaaggatggtctgtacttcctcgctatcatcaataaacagcacaacagggtccttaccactgataaccttatctctgatggcgactgttacgagaaaatggtttacaagcaactcggacaaatctcacagcaactgcctcgaattgccttctccaatagttggcagcagaagattactattccagccgacgtgatgcgtataaagaaaactggcagctttaaaactaataatgacgatctacaaaaactgatagcgttctataagtacttcatttcccaacacaaagaatggaacagtttttttaacatcaggttcaccgagagggataattacaaaaacctgccagacttctattccgaggtagatactctgttctactctttgtctttcctgaaagttagcgttgactatattaaccagcttgttgatgagggcaaactttatttgtttcgcatctggaacaaggatttttctgaattctcaaaggggacccccaacctccatacgctgtactggaagatgctgtttgatgagcggaacctagctgatgtggtgtataagctgaatggtcaggctgaagtgttctaccgcaaggtcagcatcaaacccgaaaaccgaatagtacaccaggcccaccggcccataacaaacaaaaacgagctcaatgaaaagcgcacttcaaccttcgagtacgatatcataaaggaccgaagatatactgtggacaagttccaattccatgtcccaatcaccattaattttaaagctaaagggcagaacaatatcaatcccatagtccaagaaaccattagacaggacggcttcaagcacattatcggaatcgatcggggcgagaggcatctgctctacctgtccctgatcgatttgaacgggaacatagtgaagcagatgacgctcaacgacatcattaatgaatacaaagggcagacttacaagacaaactaccatcatctgctcgccaaaagagaaggggagagaacagacgctcgaaggagttgggatactattgagactattaaggaattgaaggaaggttatttaagtcaggtaatccacatcatctccaagatgatggtagagtacagcgctatcgtggtgctcgaagaccttaacattggctttatgcgcggaagacagaagatcgagcgtcaagtgtacgagaagttcgaaaaaatgctgatcgacaaactcaattgctttatagacaagcagatcgccccccaggaggtgggtggcatgttacacccgatacagctcacaaataagtttgaaagcttcggtaaactcggcaagcagagcggatgtctcttctacatccctgcatggaatacatctaaaattgaccccgtcactgggttcgtgaatcttttcgatacccattatgagactagagaaaaagcacggttatttttctctaagtttcagcgtattaacttcaatgaggagaaggggtggttcgagttcgcgtttgactacaatgatttcaccaccaaggccgaggggacgcgcacacaatggacgctctgcacctacggggaaaggattagaacgttccggaatccggataataaccaccaatgggacgatgaaaggattgagctgacagaggagtttaagcagttgttcgagaagtacgacattaacatcagaggtaacctcaaggaggccatttccaatcagagtgacgcacaattttatagagatctgctgggattgatgaaactactcctccagatgaggaactcaataaccaattcagaggaggactatctgctgtcaccagtcgccgatgagaatggccacttcttcgactcacgggaagagatcgagtccttgcccaacaacgcggatgcaaatggcgcgtataacattgcccgaaagggactgtggatcatggaacaaataaagaaaacagacaaccttgccaagttaaaactcacaatctcaaacaaggaatggctgcactttgcacagaataaaccctacctgaatgaa

SEQ ID NO: 755 - DNA, 3825 bp, synthetic construct
  misc_feature 1..3825: note = Sequence codon optimized for human expression
  source 1..3825: mol_type = other DNA
atgaagaaggagaacatctttgagaatttcacacaccagtacagccttagcaaaacacttcgcttcgagctgatcccaaccgaggaaacaaagcggttcctcgaaaagaatgagatcattaagaaggacgccgtgatcgatgaatcgtaccataaagcgaagccttactttgacagcctgcatagggagtttattaaggaaagtctcgatcccgaacgaagcttgctttccttcggaaactttgagcggagctggaacgactttcaaaaagataagaagtcaaacaaaaagaatctgctggcacagaaaaagctcctctacaaagacatcgcgaagctgttcgacgactacgtgaatacttggaaaaagcagtacgctccagagactaagaattctggcacgaaactgttgtactcggccgatacactgtcgattctcaaaaagcggtttccaaaagatagcgaaaacgagaagttattcatcaaagatgaacatgggaatgataggtacatctttgattctttcgaccgttttacgacttatttgaccaagtttcaagcaacccgagaaaacctgtacaagaatgatggcacaagcactgccgtggcgactagaatcgttgagaatctgtcattctttctggctaataagagcaagttcgaaaaatttctcgcgtacaaagatatcttaaagctgactgaccaggagaaagagtcctcaaagactgaatactacatgcgatgcatgactcagcccggaatcgagaaatataatgccttggtcggcgatctcaatgcacggatgaaaaccctgcgcgacactgccgggaaggacgctaagaaatctgactatcctcttcttaagaagctgtataatcagatcctggcggagaagaagatagaatccgataaggtttttgatatcgagtccaacgaagaagttcccgttaggatgcacgagttttatgaagaggtcgaacgagtgtcaacaatcgcaaaagagctggttaccatcttagcccagggcggcttcgaaaacgaatatggtggcatctacttgcataacagagcaataaacaccattgctcgcaagtggttcgtgtcagcctatgaattcgagaactgcctgcctcaaaaggggaaaaagaaggaagggtctgtgcgagtggcaccattcgtgtcctttgctgagattaaggacgctctgggcgagaagctggccgaggatctgctgaaggaaaaattattcgaagagaaggcctatcgtctagtaaaacggacccttgcctatagccagtttctggctctgtttgcaaaagacctagaaatcttacttaacgagtacaacgaaaaaaagaataattttagtaaaaaggatctccgcattttcgagaggggggaaaacgatgagaacgtggatgccctcaaggacgcactagacgctggcctgcatattgttcaatttatgaaatactttgtactatcttccaagaaagccgatgacaagcccacccacacgagtgctgaattttataaccactacgacgaactttatggagatcccgaccagaaacatgacatcgtgaggtactatgacgccttccgcaattttctcaccaaaaagccggcagatcagaaaaagatcaagctgaatttcgagaacggtgcattgctgacgggctttgacaaggacaaggagtcagagaaactggggatcattctccggaaaaatagtatatattacttaggcattattaacaaggaacacaataaaatcttcgacgataaaaaacatcaagacgctttcgacgtcgtggatgccacttcctatgagaaaatggagtacaaactgttccctgatcctaaaaggatggtgcccaagattgcatttgccaagaaaaatcgggaaagattcggatggacacaagagatccaggacattaaggatgagtatgcaagattccaggacgatcgcggagatagaagtaactggtccaagcagtttgataagattaagcttactaagttgatagcctactaccaacacgctctggatcgcggtggttacaaaaacacatttgatttccaatggaacaaccccgtggactacagcggaattggcgagttcaacgatcacttgacctcccagaattacaaaatcgggttcaggcaggtgcggcagcggtacatcgatgataaagtcgcacagggtgagctctatctgttcaaaattcacaacaaggatttcggggagaagtctaagggaacccagaatacccacactctgtacttcttaaatctgttttcccagcacaacctcacccacatcaaactgagactcgctgggaatgccgaggtcttctaccggaagagcagcacgcagagaaaggaagagcaacgcaaattcatcaggccaatcgtcaagaataaaagattcacagaggacaaatactttttccacatccctatcaaaattggagcctccgtgaattctatctccgaaaccaagtttaatagaaccctgaacgagaaactcaggcagagcgcttgtctgatcatcggcattgacagaggagagaagcatttggcgtattattccgtaattaaccagaaaggcgaaattgtggatcaggccagtctgaacaagataaacgacgtggactactgtgagaagctccgcacccgagagaaggagcgtctggaacagcgaaaaagttggaaagcaatctctcagatcaaagacctcaagcgtgggtatatatcacaggttatccacaaactgagcgagctagtgattaagcataacgcgatcatagttttcgaagacctgaatatgaggttcaaagaggtgcggggaggaatcgaaagaagcgcttatcagcagttggagaaggccttgatagagaaatttgggtatctagtattcaaagataaggaccctctagaagctggaggtgtgctgaacgggtatcaactcagtgccccctttgagtcatttgagaaaatgggcaaacaaaacggagtcattttctacacaaatcccgaatacacaagtactaccgatcccgtcaccggctggagacagcacatatacatcaagagcgatgccacagataatgaggccctcaaagtattcacggaaaagatagggataggttggagcgatgacaagcagagctacactttttcctatgaccaaaaggacttctgggaggatagtcctgcacgcaagtgggtcttgtacgccaatgcgcctaggctggagaggtaccgcaacgacgctggctattggacaacacgagaaacaaattccaacgacctcttgagagaattattcgaggtttgggatttcgaccaaccggagggcgatatcagcgaacagatagccatgatgtacgaagagggcaagcttaagggggagaagattatttctgagaaaagtcaacgtttctttaaggccctgaggtatgcccttaatctgacgcagcagattcggaactcagactcgatccggtatgtctatgaaagagacgcacagggagacatagtggaggactctcagggcaagatggtcgtgaaagagattggtgagaacgtggactttatagcttcaccagtcgtgccatttttcaccaccccgaatccatataccaaggaaaacctttgcgggctcgtaattgagaatggagacgccaacggcgcatataacattgctcgcaagggtattatgatgctagaaaggatcaaacagacacaggccaatccagatctgtacatttcaaaatccgactgggacgaatggcttatgaaagacattaagcagaag

SEQ ID NO: 756 - DNA, 3771 bp, synthetic construct
  misc_feature 1..3771: note = Sequence codon optimized for human expression
  source 1..3771: mol_type = other DNA
atgaatgacttgaaaaccttcatcggtatctatcccgtgtcgaagacactcaggtttgagttacggcctatcggaaagacacaggaatggatcgagaagaataaggtcttggagtccgacgagcagaagtccgccgactaccccaaggtaaaagctctgattgacgagtaccacaaagtgtgcatccacgaatccctgaaagacgtgtcattcgactgggccccactgaaaaatgccttaggtgagtatcagaaagagaagagcgatgaatctaagagcgtgctcgatagagaacaaactaacatgcgcaaaaaggtggctgctgctattaaatcgtttcaacattatgagcagcttactgccccgactccacaaaaattaatcgacgacgtcttccccggaagatacgaatcggaggcactgaagtctttcaaaagattcgcgatttattttcgtgggtttcaagaaaaccggaacaacatctattctgccgacgcaatctccacaggcgtgccctaccgcctggttcacgagaactttccaaagtttatcacgaacatcgaggtgtacaacaatatcaaagccaattgtcccgaggtgatcgaacaggtcgagacagagttgcagcctttcctgaaagaaatcaggatagaatcaatttttaacttggactattacaattcactcctgacccaggacgggattgatttctataaccaggtccttggaggagtggcagaagagggaaaacaaaagtaccgggggattaatgagttttctaatctatatcgtcagcagcacccggaaatggcaggaaagaaaaaagccctgactatgatacctctgttcaaacagatcctttccgaccgggagacactgtcttacattccccagcaaatcgaatccgagaggcagctcgtgagtatgctcaaacaattccacagccacattctgaactacgagtataatggaaatagcgtgaacgtgctgagagccctgtcccgtatgatctccaaagttgacgaatacaaccccgaaggtatctacatagcagccaaagctctcaccgatatatcacaggttctgtatggcaagtggagcgtgctcagcgacaaactgtacgatagtgccgtcaagaagtatggcgaaccaagtactgccaagaataaaaagaagattgacgcctacgtcagcaaagaggcgtattcactcagtgaggtcgggctcattggggatgtggggctgtctagctatttctcctcagtatcacagtcaattgagcaagtagatgagaagtgggcgcggttcattaggtggtgcgataatgacgaagagcagctattcttaaataaccctgagggtacagagctagtacgcgcccttctggatagctatatggatatcctgcaccgctgtggggtattggtagtgagcgtggaaaatgatctggacaaagatttctacaacgatttttttccgatatatgcagaactagagaatgttattatcatatacaacagagtccgcaattatctcacaatgaagccctatgataccaagcaatttaagttgaatttcggcgtcccaaccctgggcgatggctgggatcagaacaaagaaaaggacaacaaaaccattcttcttttcaagggcggtctatcctacctaggcatcatgaacccgtacaatacccccaagataaaggaatgtaaggtggactccgaggatacttactcaaagatggtgtataagctgctccccgggcctaacaagatgctccccaaggtgttcttttctaagaaagggctgcagtcttttagtccaagcgagcatatccaagaaatttataggaacggttcctttaaaaaggggagcccagatttcaatcatgagcgactccacgaattaattgatttctacaaggacagtatcagcaagcatcccgactggtcaaagtttgactttaagttcagtcccactaagtcttatgaggacattagcgccttctacgatgaaatctccaaacagggctacaaaatccaatttataaacatatcagagcagcaggtcaatgaatgggttgccaatggacagctctacctgttccaactgtacaataaggactacgctgagggcgcacatgggagaaaaaacctgcacaccctctattgggaaaacctttttacacctgagaaccttaacaaccttgtgctgaaactgaatgggcaggctgagctcttttaccgacctagtagcatcaaaacgcctgttaagcatgtggtgggctcgaaaatgttgaacaggcgggataaaagtggtatgcctatccccgaaacagtttacaagtctctgtaccagtacttcaacggtaaaaagctgaaatccgagctgaccgccgatgaaattgcctatattgatcagatcgtggtgaaagacgtcacccacgaaatcatcaaggacagacgatacacaaaacctgaatatttttttcacgtgccaattaccttcaacgcgaatgcagaaggtaatgaatacataaatgagaaggtcttggactatattaaagacaacccagacgtaaatattattggaatcgaccggggagagcggcatcttatatatctgacgttgattaaccaacgcggagagattcttaagcagaaaactttcaatctggtcggcaattacaactaccatgccaagctggagcagcgagagaaggaaagggacgctgccagaaagtcctggcagagtataggaaagatcaaggacctgaaagaggggtttctatctgcagtaattcacgaaatagctgtcatgatgatcgagaacaatgctatcgtggttctggaagatctcaactctggctttaagagggggaggtttaaggtggagcgccaggtgtatcagaaattcgaaaaaatgctgatcgacaagctgaactacctctccttcaaggattgcaaggcagacgaagtgggtggcattttacggggctaccagctcgcacagaagtttaccagctttcagaagttgggaaagcagtctggctttttgttctatatcccagctgcctatacaagcaaaattgatcctgttactgggtttgtgaatcatttcaactttaatgacgtaaccaacgcggagaaacgcaagagtttcttcatgaacatgaatcggattgaaatgaaaaatggcgacatagaattcgagttcgattacagaaaattcaagacctaccagagcgattacaggaacgtgtggacggtcaacactagtggaaagcgcattgtgtttgacgcagagaagagacagtccaaggattattacccaacgaaggagatcgtcgccgctttcaaggacaaggatataatcctgaaagacggcatgaacgttaaaagcttaatcgcgaatattgaagcaaatgctcgtaacgcttctttttttggatctttgttctacgctttccagaaaacactgcagatgcgaaactcaaacgctaccaccgaggaggattatatcctgtccccagttgtccacaatggcaagcagttctgcactatcgatgaggtgaacaagggcaaaaatgcggaggggaattggatcagcaagcttccggtcgacgccgatgccaatggagcctatcacatagcactgaaaggcctctacttattgatgaacccacaaacaaagaagatcgagaatgaaaaatggtttaagttcatggtggagaaaccttacattgagcttaaaaatatcgataacttcgtt

SEQ ID NO: 757 - DNA, 3783 bp, synthetic construct
  misc_feature 1..3783: note = Sequence codon optimized for human expression
  source 1..3783: mol_type = other DNA
atgaacacatcactattctcatcttttactaggcagtacccggtgacaaagacccttagatttgaattaaaaccgatgggcgcgaccctcgggcatattcagcagaaagggttcctccacaaggacgaggagctcgccaaaatatacaagaaaattaaggagttgctggacgaatatcatagggcttttatagccgacacactgggtgacgctcagctggtcgggctagatgatttctacgcggattaccaggcacttaaacaggacagcaagaattcacacctaaaggataaattaactaagacccaagataacctcaggaagcaaattaccaaaaattttgaaaagacgccccaattaaaggaaaggtataaacgcctctttaccaaggaactgttcaaagcgggtaaggataaaggagatctcgaaaagtggctgattaaccatgatagtgaacctaacaaagccgagaagatatcgtggatccaccagttcgagaactttaccacctattttcagggattttacgagaaccgtaagaacatgtattcggacgaggttaaacacacagcaatagcttatcggctgatccacgagaacctgccaaggttcgttgacaacatccaagtcctttctaaaatcaagtctgattaccccgatttgtaccacgaactgaatcaccttgactctagaactatcgatttcgcagacttcaaatttgacgatatgctccaaatggatttctatcatcatctgctgatccagagcggtatcacggcatacaatactttgctgggaggcaaagtgctggagggcggcaagaagctgcaggggattaatgaactcatcaatttgtacggacaaaaacataagatcaagatcgccaaactaaaaccactgcataaacagatcctgagcgacgggcagagcgtgtccttcctcccaaaaaaatttgacaatgactatgaactttgccagacggtcaatcatttttatagggaatacgtagcaatttttgatgagctggttgtgctgtttcagaagttttatgactacgacaaggacaatatttatataaaccatcagcagctcaatcagttaagccatgaactatttgctgattttcgcctactgagtcgggctctggacttctattactgccaaattatcgatggagacttcaacaacaaaattaataatgcaaagtctcaaaatgcaaaggagaagttactgaaggagaaggaacgctacaccaagtccaaccattcaatcaacgaattacagaaggccatcaaccactatgctagccatcacgaggacactgaagtgaaagttatctccgactatttcagtgcgactaacattcggaatatgatcgacggaattcaccatcacttttccacgatcaaaggcttcctggagaaggataataaccagggtgagagctaccttcctaaacagaagaatagcaatgatgtgaagaacctcaagctgttcctggacggagtactccgccttattcattttataaaaccattagctttgaagtcagatgatactcttgagaaggaagaacacttctatggcgagtttatgccactgtacgacaaactagtaatgtttactctcctgtataacaaggtgcgtgactatatcagtcagaaaccatataacgacgaaaagataaagctgaatttcggcaatagtaccctgctgaacggctgggatgttaacaaggagaaggataactttggggtgatcttgtgtaaagaaggcttatattatcttgccattctcgacaaaagtcataaaaaagttttcgataacgcccccaaggccacatcctcccatacataccagaagatggtgtacaagctgctgcccgggccaaacaaaatgctccccaaggtgttctttgcaaaaagcaacatcggctattatcaaccctctgctcagctgctggagaactacgagaaggggacccataaaaagggatcaaacttcagcctaaccgattgccatcacctcatcgacttcttcaagagctcgatcgctaaacaccctgagtggaaggagttcgggttcagattttccgacactcacacatatcaggacttgagcgacttctataaggagattgaacctcagtcatacaaagtaaagtttatcgacatcgatgcagattacatcgacgacctcgtggagaaggggcagctttacctgtttcagctgtacaataaggactttagcaagcaatcttacggtaagcctaaccttcacacactgtatttcaagagcctattttctgatgataatcttaagaaccctatctataagttaaatggagaggcggagattttctaccgacgggccagcttgagcgtctccgataccacaatccaccaggccggagagatccttacacctaagaaccccaacaatacccacaatcgcactttgtcctacgacgtcataaagaacaaacggtacaccacggacaaatttttcctccacattcccattaccatgaacttcgggattgagaatactgggttcaaggcatttaaccaccaagttaatacgacactgaagaatgccgacaaaaaagacgtgcacatcatcggcatagatcgaggcgagcgacacctgctctacgtgtctgttatagacggcgatgggcggatcgtcgagcagagaaccctgaatgatattgtcagtatatcgaacaacggcatgtctatgtcaaccccctaccaccagatactggataatcgagagaaggaacggttggccgccagaaccgactggggagatattaagaatatcaaggaattgaaagccggctatctcagccacgtggtgcacgaggtcgtacagatgatgctgaagtacaatgctatgatcgtgctggaggacctgaattttggctttaaacacggccgctttaaggttgaaaagcaggtctaccagaattttgaaaatgcccttatcaagaaactgaactacttagtcctcaagaacgctgataatcaccagctgggctccgtgagaaaggcactgcagctcacaaacaattttaccgacattaaatctattggaaaacagacgggttttatcttctacgtccctgcctggaacactagcaagattgacccgacaactggcttcgtggatctgttgaaaccacgttacgagaacatggcccaagcccagagtttcatttcaaggttcaaaaaaatcgcctacaatcatcagttggattacttcgaattcgaattcgattacgctgacttttatcaaaagacaattgacaaaaagcgcatttggactttgtgtacctacggtgatgtgagatattattacgaccacaagacaaaggagacaaaaaccgtgaacatcaccaaggagttgaagtccctgctggataaacacgacctgagttatcagaacgggcacaatctggtggatgagctagccaattcccatgacaaaagtcttctctccggtgtcatgtaccttctgaaagtgctgctcgcattgagatattcccacgcgcagaaaaatgaggacttcattctcagcccagtaatgaacaaagacggagtgttcttcgattcccggttcgcagacgatgtcctccccaataatgctgatgctaatggtgcttaccatattgccttgaaaggactctgggtgctgaaccaaatacagtcagccgacaacatggataaaatagacctgtccatctcaaacgaacagtggcttcatttcacacaaagtagg

SEQ ID NO: 758 - DNA, 3852 bp, synthetic construct
  misc_feature 1..3852: note = Sequence codon optimized for human expression
  source 1..3852: mol_type = other DNA
atgaaggatttcacccaccaatattccctaagcaagactctccggtttgagctgaagccagtgggggaaacagcagagcggatcgaggattttaagaatcagggcctcaagagcattgtcgaggaggatagacagcgagcggaggactacaagaagatgaagagaatcctagatgactaccataaggaatttattgaggaggtgttaaatgatgacatttttactgccaatgaaatggagagtgcatttgaggtgtaccgaaaatatatggcctcgaagaatgacgacaaacttaagaaagagatcaccgagattttcacggaccttcggaaaaagattgcgaaggccttcgaaaacaagtctaaagagtactgtctgtataagggagacttcagcaaacttatcaacgagaagaaaacagggaaggataaaggccccgggaagctctggtactggttaaaagccaaagccgatgctggtgtgaatgagttcggtgatgggcagaccttcgaacaggcagaagaagcgctggccaaattcaacaatttttctacctacttcacgggctttaatcagaaccgggacaacatttacaccgatgcagaacagcaaacagccattagctaccgagtaattaatgaaaatatgaccaggtactttgacaattgtatcagatatagtagcatcgagaataaataccctgaattggttaaacagctcgaacctctgtcaggtaagttcgcgcctgggaattacaaggactacttaagccagaccgctatagacatctataacgaggctgttggacacaagagcgatgacatcaatgcaaaaggcatcaaccaatttattaacgaatatcgtcaaaggaactcaattaaaggccgagagctgcccatcatgagcgtgttgtataagcagatactttctgatatcaataaggacctcatcatagacaagttcgagaacgcaggcgagctgctcgacgccgtcaagaccctgcaccgcgagttgacagataaaaagatcctcttaaagattaagcagacacttaatgaatttctcactgaggacaattccgaagacatctacattaagagcggaacagatctgaccgctgtcagcaacgctatctggggcgaatggagcgtcatccccaaagccttggaaatgtacgcggagaacatcaccgacatgaacgccaaagcgcgtgagaaatggctgaaacgggaagcataccacctgaagacggtgcaggaggcaatcgaagcttacctcaaggataacgaggaatttgaaacgcgcaacatttccgagtattttaccaatttcaaatccggtgaaaatgacttgatccaggtggtgcaatcagcgtatgccaaaatggagtctatctttgggatcgaggattttcacaaggatcggcggccagtcacagagtcaggggaaccaggcgagggcttcagacaggttgaactggtacgtgagtacctcgacagtctgatcaacgtggagcacttcataaagcccctccacatgttcaggtctggaaaaccaatcgagctggaggactgcaacagcaacttctacgacccacttaacgaggcgtataaagaactggatgtggtgttcgggatctataataaagtccgcaattacgtgacccagaaaccgtactccaaggacaagtttaaaattaattttcagaacagtactttgctcgacggatgggatgtgaataaagagagtgccaatagttctgtcctgttactgaagaacggaaagtactatttaggagtgatgaagcaaggagctagcaacattttgaattaccgccccgaaccttcagattccaagaacaagataaacgcaaagaaacagctctcggagattgctttggcaggagctactgatgactattacgaaaagatgatatacaagctgctgcctgacccagccaaaatgctaccgaaggtgttctttagcgcaaagaatattgaattttacaacccaagccaggagatcatctacattagggagaacgggctcttcaagaaagacgccggggacaaggaatctcttaaaaagtggatcggcttcatgaagacctccctactaaagcacccggaatggggctcttacttcaacttcgagttcgagcctgcagaggattaccaggatatttctattttttataaacaagtcgccgagcaagggtattcagtgacattcgacaaaatcaagacttcctacatcgaggaaaaggttgcttcaggcgaactgtacctgtttgagatctataacaaggacttctcccctcacagcaaaggacggcccaacctgcatacaatgtattggaagagtctatttgagaaggaaaaccttcaaaatcttgtgacaaaattgaatggggaagccgaggtctttttccggcagcactccatcaagcggaacgaaaaagtagtgcatagagcaaataggccaatccagaataagaaccccctgaccgaaaagaagcagtccatatttgagtatgatcttgtcaaagataggagattcaccaaggacaagttcttcctgcattgccccattacgctcaattttaaagaagctggtcctggacgctttaacgataaggtaaacaaatatattgccgggaatcctgatatccgcataataggtattgataggggagagaggcacctgctgtattattcccttatagatcagtcggggagaattgttgaacaaggcactctgaatcagatcacatcaacactgaacagcggcggacgagagataccgaaaactaccgactatcgcgggctgctcgacaccaaggagaaggagcgagacaaagctagaaaatcctggagcatgatagagaatatcaaggagctcaagagcggctacttgagtcacatcgtgcataagctggccaaattgatggtaaagaataatgctgttgtcgtgctagaggatctgaacttcggcttcaaacgtggccgcttcaaggtggaaaagcaagtctaccagaaattcgaaaaagccctgatcgaaaagctgaactacctggttttcaaggatgctcggccagcagaacccggccactacctgaatgcttaccagctgactgcacctttagaatcattcaagaaactgggtaagcagagtggttttatctattatgtgcccgcctggaatacatccaagattgacccagttactggcttcgtaaaccagttctatattgagaagaactctatgcagtacttgaagaatttttttggtaaattcgactctatcagatttaatcccgacaaaaactatttcgaatttggtttcgactataaaaattttcataacaaggccgccaaatcgaaatggacaatttgcacccacggcgacaaaaggagttggtataacaggaagcagcgcaaattagagatacataacgttactgagaacctcgcctcactgctctccggaaagggaattaactttgccgatggaggatccatcaaagataagatcttgtcagtcgacgatgcaagctttttcaaatctctcgcctttaacttcaaactgactgctcaacttagacataccttcgaggacaatggggaagagattgattgtatcattagtcccgtggctgctgccgatggcacgttcttttgctccgaaacagccaagaaactgaacatggaactgccacatgacgcagacgccaatggcgcttacaacattgccagaaaagggctcatggtgcttcgccagataagggagtcaggcaaacctaaacccataagtaacgctgattggctggattttgcccagcagaatgaggac

SEQ ID NO: 759 - DNA, 3612 bp, synthetic construct
  misc_feature 1..3612: note = Sequence codon optimized for human expression
  source 1..3612: mol_type = other DNA
atgaagcagagcacccagtacgacgattttactaatgtctattcccttagtaagaccctgagattcgagctgaaaccagatcctctaaccgcagagtatattgaaaaggaacagatgctggaaaaagacaagtccatctcccagagctaccaggagattaaggagtacttcgatcgcctccacagggatttcattaacgaggccctggccaaggttaacttggactgctcacactactgggaactttttcaggcgaaggataaaaaagcactgcagatcgaagccgacaagttgcgcaaaaatttcggcactgccttcaatttagtgggcaggcagtggtccaaactcgcagggatcaaggaggagaacgaggagaacgaaggcaataaggaccagagtaagtacagagatatactgttcaagaaagaagtgctggacattatcaaggcccggtatggacagggcgacgctcgtttggctgctctgctggaaacatttaaaaacttctttacttatttcataaatttcaacgagagcagaaagaacttctacaaactggacggaacctcaactgctatcgctaccagatcgatagacgtgaatctaaaaatcttttgcagcaacatcgcaaatgttcaatacctgcccgacggaattcagctgacagatgaggagagaagcctgtttgagattagaaactatcagaccttcctgcaacaggaaaagatcaaacaatataacgaccttatagggacaataaatgggaagatcaataattatagacaggctaatcatcagaagattggcttcttaaaaatcctgcagaaacagattctgggtgatgccaacaatccttcaaccaagttcattgagatcacagacgacgcctccgtgtttccggtcctgaatgagctcataaacaatgccgaggaaccattcagaaagttctataaggagctactccccaagatcctccctgatacaactgataatagtattgatctatcaaaggtgtatctgtctaaggtcgccctgaacaccatctcctcaaaggtgtgtcagagctggtgtacattaaaggatattctagaaaaaaagaatgactttagtttagacaacgtgctgacgagtctgaagaataatcaacagcaggccaaggagatctttcgggatgacgtgctgaagaacttcctggcagacagcaatgataaaatttttaagaaatggttgtataatgaataccagaaatcatacgagcgttactgcgccgcaaaagacgtacttttgtgtaaaatggagcaggacaagagcttccgaaaagaggaccaggagcagaagaatattattaaagagttttgcgacgctgctctagaagtttacaggatgatcaaatatttttatatcgataggagccaaaactctgtcgaagtggacccaatcttctataacatcctggatcctatcctagacgactgctcagtgtatcaatactataatgagatacgcaactacttaaccaaaaagcctttttctcaggataagatcaagctgaatttcggaaacgggcaactcttgcagggctgggacgaaaacaagctgaaagactataagggagcgatcctccgtcacggtgacgattactatttgggtatcttgatggggaatcaggtctttcagaccaacaacaaggaggcatacttagacaacacaaatggccacggctgggagctgatgatctacaaacagattgctgatgctcaaaaagatgtgcctaggttgttcttcgccaaagcaaatctcgcgctgtttcagccgtccgacaatattaaacggattaaggactccaaaagttacctgcggtcgtcagataacttttcaagccaggacctctatgatctcatagattactataagtcctgcattgaaaagtatcccaattggcagtgttacgactttcatttccttccaacggaagagtacaagaacatgaaggattttaccgacgatattcagagctgtgcttacaaagtcaagttcgtgcctgtgcgggaccagtacataaaagagcagcaaagtcagaagcagagccaaaaacagtctcaggtggggctcctcctttttaaaatcaccaacagagactttctcccccaagcccatggctgcgacaaccttcacacaaaatactttcgagcgctgttcgaccaagaaaatctgcaacatccggtaattaagctgaatggcggcgcagaaatattcttccgccaggcctccatcactcccaaacttgtcgagcgtggacagaagtgtatcattgagaatcgacgatacacggaagacaagtacctcttccacttcccaatcacacttaacgttaaccataagatcactccaagggcgtttcgggcaaaaatcaataatctgctctataccaaccccaatattaatatcatcggtatcgataggggcgaaaaccatctgctgtatatctctgtagtgaaccaaaaaggggagatcttagatggtccccgcccgctcgacactgtgaacggcatcgattatctcggactgttagaaaaagttagcaaggacagggaccgagctcgaaaaaactgggaatccatagccaagatcaaggacctgaaagcgggctacgtgggtcaagtagtcaaggtaatcgccgacttggccctccagtacaacgcaatcgtcgttctcgaagatctcaatacaggttttaagaggagcaggcagaaaatagagaagcaaatttaccagaactttgaactggccttgattaacaaactgaattattttgtgaaaaaagaggcaatgcctggagagaagggccacttcttgtccgctttccagttgaccgagccaattacttcctaccaagacgtcggcaaacagacagggatcattttctacgtgcccgccgattacacttcaattacctgtcctcagtgcggcttccacaagagtttcaacttttatcataagaacaagaccgaagatgaacacctcctgaagacaatggatctacggtatgacaatgatgatgaatgtttcaagctgacctgtaatctgatggcactgagcaataacaaaaagcaggataacaatgagctggagctgtccagcaaaaacatacagaggtggcgctgggggacaaacaagcgggagcttgttagctacgatattactaagtgccttgccgaacttttcagtaagttgcagatcaattacacgcaggaacgcggaaatctcctgaacctttttatcagtcagcagcccacaagccaggactacgatgccctcatattttatcttcaactctggcaaaagatccgcaactccagcccaactagccccgactacatacaatgcccacactgcggatttcacagcgacaatggattccgcggaaaagagtggaacggggatgctaacgggtcgtacaacattgccagaaaaggtatactgattttgggaaaaatcaaacagtttggggataaccatcacgatcgggatcaagagcatatttttgatgaccttaagtggagcgacttatctattaacacggaggagtggaacgaatatgtggggcggcag

SEQ ID NO: 760 - DNA, 3891 bp, synthetic construct
  misc_feature 1..3891: note = Sequence codon optimized for human expression
  source 1..3891: mol_type = other DNA
atgaatgcacagaagtcattcttcggagattttaccaatctttacagcttacaaaagacattaaggttcgaattagagccacaaggaaagacactagaacatatcgagaacaagggtctgatctcccaggacgagcagcgagccgaatcctacaaaaaaatgaagaaaactatcgatggtttccataagcactttatcgagatagccatgtctcaagtgaagttaacaaagctgaaggagtttgtcgacctgtacaacgccagcccggaaaggaagaaagaggatgggtttaaaaagtcttttgagaaggtgcagacggagttgaggaaagaaatcgcgatggggtttagggcaggagaggcgaaggagatattctcaaagattgacaaaaaagaactggttactgacctattagagaagtggatgcagacgcaggaagaagacctgtacttcgacgagagctttaagacttttactacatattttggggggtttcataaaaaccgtaagaacatgtacacagataaggaacagtccacatcgattgcctaccggctggtgcacgaaaaccttcctaagttcctggacaacatcaaggttttcgagcggataaaaagcattccagtgctctatgaaaagtgcaccacactttatactgaaatcaaggaacatcttgatatcaaagacattaatgaagccttcaatctgtattgctacaataaagtgcttacccaaaaacagatcgatgcttataatctcgtaatcgggggcatgaccgcccaggagggaaagaaaaagattcaaggcctgaacgagcacataaacctgtataatcagcgacaggacaagaaggaccggatccccaaactcaaacagctgtacaagcagatcctgagcgacagagaatcagttagctttctgccagaggcttttgaagatgacgagtctaagaccgcctcccagaaggttttgaacagcatcgaagagtattaccaggctaatcttgtcagtttccatccccgagataaggatgaagccgagaatgttctggagaagataaaagagctcctgaccagtcttaaagactacgatagtaataaaatttacctgagaaatgataaggcaatcaccgacatctcgaaggctctcttcggagattggggcatcatcaaagtggcgctggagtttgcatttctccagacactcaagatcggcgaaaagggattgagcaaaaaacaggagaaggaaaaagagaattatattaagcagtctcacttctcagtagcagagattgagaaggctctgttcgcatataagaacgaggcggaagtgctgaacgacttgcatgaaaacactacccctctcgccgattatttccacactaacttcctggccaagaagaaggaggaaagcgacaaggagtttgatcttattgccaatattcaggctaagtattcctgtattaagggcatacttaatcgggattatcctaaggaaaagcggctgcaccaagataaaaagaccataggcgacatcaaggcgttcctcgactccctaatggagctgctccatttcgtgaaacagctcagcttgccttccgacacgacgctggagaaagacgaaattttttactcacaatttcagccatggtatgaccaattgcagctgctgattccgctttataacaaggtccgcaattatgcttcacagaagccctacagcatcgagaagttcaaactcaactttcagtcctctactctggcacagggctgggacctcaacaaggaacacaacaagaactacagttttatctttcaggaaaacgacagcttcctgctaggcattatcaatatatatgacgacaaggatattctgagtaaggacactcgccccgaaatattcgtggacgattccccactgaaaaaaatggtgtataaaaacctgggtgatatcaaaagacagctgccccgcatcgcattcagtgacaaggctaaaaagtgtgtcgaaaaaatcggctggaatcaggagatcgaagccatcaagaaagaattcgacgaatttcaggacgccaaaaaaaatgataaggatctttggaaagatgagttcgacaggaaccagctgtccgagttgattgactactacaagggcgtcttgaagaatcactcagaaagatatgaagacacttataagttggaatataaaagcaccgagtcttataaaaatctgggtgagttttttgatcatatcacctcccagacctacaaggtcaccttcgtcggaatagacaaaaactatataaatcgtctggtagatcagggcaagttatacctctttcagatatacaacaaagacttcagtgagtatagtaagggcaagcccaacttgcacaccctgtattggaaggccctgttcgatccagagaacctgaaggatgtaatgtacaaactcaacggcggagctgagctgttttatcggaaaaaaagcataaaggatctggcgatccataaagcgaatgagcctattaaaaacaaaaatccaaacaaccctaaaaaagagtccgtgtttaagtacgagatcgttaaagattacagatacacagtggataagttccatttccacgtccccatcacattaaatttcaaagctacggaagctggatatattaacaatacaatcctcggttttctcaaagataatccggacgtgaacatcattggaatcgacaggggcgagaggcacttgatctaccttactttgatagaccaaagaggaaacattcttgagcagagatctctcaacaccattattaacaagaaattcaatgttaagaccgattaccatggacttttagacaaccgcgagaaggaacgcgataaggctcggaaaaactggggcaccatcgaaactattaaagagcttaaagagggttacattgggataatcgttcacgagatttccagaatgatggtggagcacaatgcaatagtcgtcatggaggacctgaattttggttttaagagggggcggtttaaggtggagaaacagatctaccaaaagctagaaaagaagctgatagacaagttgaattacttgattttcaaggataaggcaaataatgaaacagggggcctatacaaagcactccaactcacctctaagtttgagagctttatcaagctcggcaaacagtccgggttcctgttttacgtcccagcctggaataccagcaaaattgatcccaccactggttttgtgaacctcttcaatacacgctacgagaacgccgacaaggctaaaacgtttttcgacaatttcgaaaacatctgttataatgtggagaaaggctattttgagttcaaagtgaaaaagtactcactgttcaattcaaaggcagacgacacgcgtcaggagtggatcatttgcacacaaggggatagaatcagaactttccgaaaccctgagaaaagcaatcagtgggataacaaggaaatcgtactcctagacgaattcaagaatttattcaaggagtacgggattcgctacgaggaagatctaaagcaccagatcctttcgcaaacagaaaaaaccttctttgaaaaactgctgaacctgttcaagattacagtgcagatgaggaacagcattaccaacagtgagactgattacctcatctctcccgtgatgaatgccaagggggaattctacgactctcgcaaagccggggacaacctgcctaaagatgccgatgccaatggggcctaccacattgcaaaaaaaggactatggctcttgaaacaaattgacgcccacgagggcgaggattggaagaagctgaaattggccattacaaacaaagagtggctgcagttcgctcaagctcggggacgactg

SEQ ID NO: 761 - DNA, 3795 bp, synthetic construct
  misc_feature 1..3795: note = Sequence codon optimized for human expression
  source 1..3795: mol_type = other DNA
atggaaaggaaggatttcatcaattacgatcaggttagcaagactattagaaacggcttaatacccaccgaatacactttaaagaacattgaggaaacaggagtattggttagcgacgagtatagggccgaggtccgaaacgtgctcaagaagatcatggacgattactacaaagagtatataaacatgtgtctgaatcgggagatcaagatggattggcggcccctgtttgatgcctacgaattagtgaagaagggtaaaatgaaacctaaggagattgagaatatccaagacgaaaaacggaaggaaatctacgatatcctgtcagcccatgacgaattcaagaaaatgttttccgccaaaatgatcaccgagctactgccccagttcattagtcagtccactggatataacgaagacgagaagaaacaatacgaagaggtaattcacatctattctagattcacctctgacttcacggatttctttcaaaatagaaagaatgttttctcttctgctgggattgccacgtcaatatgcaaccggatcgtcaatgaaaatgctgagatcttctctgacaacaagtccacttttgatcgaattaagaaggacatcagctatatcgacgaaatcatcgattctgatctgaaaacttatcttgatggttgggagcttgagcagatctacagcgtggacttctacagcagacttatgtcgcagtccggaattgatttctataatatgataagtggcgctgtgaacaaagcagttaacgagtactgtcagaaaaacgggctcaacaagaataaatatttgctcaggaagctgcggaagcaaatcttgtcaaacagcgagtctacttttcagatacccgagaagtttctggcagacgaggaagtctataaggccgtgggacaatttattgacaatatcaagtctaagaacgtcatagagattttgaaggatattggcagcaactgtgagaactatgatctcaggaggatttacatcgctgagagcgcatacgaggatgtgagtatttttatgggctacggctggaacgggatcaaaggttgcctcgaaaagaagtacgaaaaggagattgcacccggaaaggcaaaggacatcaaaatcaagaagctgatctcacaggagaaagagcgaagcattggcgaaattgacgagttgtttcacatctacggcgaagaaaaagacggcaaggccgctatacagtacattgaagaagttgtggagctatgtaacgaggtgcctactcgcctggtgtatgattcttctgaaaagctgacagagaatgataataaggctgcggagatcaaaaatgtccttgattattatttcaaaatcttccattggattaaaacttttataacggacgatatcctcgataaggatatcgtgttctattccggaatagaatttgcctacgaggaaattaaggatatcgtcccgctgtacaacaaggtccgcaattacgtgacccagaagccatactcttcagagaaaatcaagctaaaattcggtaccccaaccctggccaatggatggtcaaagtctaaagagtttgacaacaatgcaatcctattggtccgggataacaaatactacctgggcatttttaatgtgctcaacaagcctgacaagaagatcatggctggctacgccaataagaaaaattccagtgactatgcgaaaatggtctataacctgctccctgggccttccaaaatgttgcccaaagtgtgtctgtcccaaaaaggcaaagacacataccatccaagcgcgtacatcgttgacaactatgagcgcaaggcccacgtgaagagcagcgagcattttagtatccagtactgtcacgatctgatagactattttaaggagtgcatcaagaggaacgacgactggaaatgctttgacttcaaattctccgatactgagcaatataacgacatcagtgagttctacaaagaggtggaattacagggctattcaataggctggacctacattagcggggaggatatcgaagccctcgataaagaagggaaactgtatctattccagatttataataaagacttctcagaacagagccatggtacagacaaccttcacaccatgtacctcaaaaacctgttctcaccggaaaacctgaataacatcgtactaaagctgaatggtgaggccgagctgttctatcgtaaatccagtattaagaaaccagtggtgcacaagaaagggtcaatattggtgaacaagacctacacagaaaagactggcaacggcgaggaagtccgacgtcctgtgccagacgacgtctatctggaactggtaaattactacaatggggagcaaaaagcaatcctcagtgacgaagctaaaaaatatatgaaagtcgtggagcaccatgaagccgttaaggacatcacgaaggattacagatatacagtgaacaaattttttatccacctccccatcaccattaatttcaaggccgagcatacaggcaacctgaacgagatggtgatccagtacattgccaaacaggagaatatgcatgtgattggaatagacaggggggagaggaatctgatatacgtgtccgtgatcgacatgaatggaaagataaaggagcagaagtcgttcaatatcgttaattcgtacaactaccaggaaaaacttagggggagagaaaaggaccggttgaatgcacgcaagaactggaagcaaatcgcgaatatcaaggagatgaaagagggatatctgagccttgttatccacgagataaccgaaatgatgatgaaatacaacgccattattgcaatggaggacctgaactatggattcaaaagaggtaggtttaaggtggaacggcaggtctatcagaaattcgagacaatgctgatcagtaagctgaattacctcgtagacaagcataaaaaggtcgacgagcccggcggcctgctgagaggatatcagttcgcttatgttcccgcttcgctcgacagactcggacggcagtgcggattcatattttatgtaccagccgcctataccagtaagattgatccgacaactgggtttgtcgacctctttaatcactccgagttaatcaaggctgggaagcgccgcgataatctaagcaaattcgatggaatttactatgatgaacagaaggacatgttttgctacgccttcgattacaagaatttcgtgacacacaacacggatatttaccaaaattcctgggaaatatacaccaacaaggagcgccttcggaagattttcggcaacggtcgcccaaccggcaaaacagagaaaatcgaacttacccaaatgatgaaggaagtgcttacaggtgcgggggtggaatacaaggatgggcacaatctgattgatgacattctcaactctaacgataactgcattaaacaggtactggatattttcctgtactccatccagcttagaaactccaaaggggaaaatgaggactcaaaggaatctgattatgaccgaataattagccctgtgttaaaccaggagaatgagttttttgactccgtagtctatgcagacaaatataagaaagacgaaaagctcgccgataaaccaattgatgctgatgcgaatggtgcatactgcatcgcattgaaaggactgtacgaaattttgcagattaaaaacaattggaaggagggggaagttttcagtcgcgacaccttaaaaatcacaaacgctgactggctgcgttttatgcagagccgtggctttgag

SEQ ID NO: 762 - DNA, 3840 bp, synthetic construct
  misc_feature 1..3840: note = Sequence codon optimized for human expression
  source 1..3840: mol_type = other DNA
atgaacaagttcgaaaatttcaccggactctaccccattagcaagactctgcgtttcgagctaataccccagggcaaaacacttgagtatattgagaaatctgaaatactggaaaacgacaactaccgagccgagaaatacgaggaggtaaaggacataatcgatggctatcataagtggttcatcaatgaaaccctgcacgatctccatattaattggtctgagctcaaagtagctctggaaaacaatcggattgagaaatcagacgcctccaaaaaggagttgcaacgggtccagaagatcaaaagggaggagatctataacgctttcattgagcatgaagcttttcagtacctgttcaaagagaacttgctttccgatctgttgcccatccaaatagaacagagtgaggacctggatgcagaaaaaaagaagcaggcagtagaaaccttcaacagattttcaacatacttcacaggcttccacgagaacaggaagaatatttacagtaaagaaggtatctctacaagcgtcacttaccgcatcgtgcacgacaatttcccaaaatttcttgagaatatgaaggtgttcgaaatactcaggaatgagtgccctgaggttatttcagatactgccaatgaacttgctccatttatcgacggcgttagaatcgaagacatttttctgatcgacttttttaactccacattctctcagaacggaatcgactattataatcgcatacttggcggcgtgaccaccgagacgggggaaaagtaccgaggcataaacgaatttaccaacttgtatcgacaacagcaccccgaattcggcaaatccaaaaaggctactaaaatggtggtcttgtttaagcagatcctgagcgaccgcgatacattgtcatttatccctgaaatgtttgggaacgacaagcaggtgcagaattctatccagctgttttataaccgtgagatttcacagtttgaaaacgagggtgtgaagacagatgtttgtactgccttagccaccctcaccagcaagatcgcggaatttgacacagagaaaatctacattcaacagcctgaattaccgaatgtcagtcagaggttgtttggatcttggaatgagctcaatgcatgtctgtttaaatacgccgagctgaagtttggaaccgccgagaaggtggccaatcgaaaaaagatagacaagtggctgaaaagcgatctgttctccttcaccgagctgaataaagcactggaattttctgggaaggacgaacggatcgagaattatttttcagagactggtatttttgcccaactcgttaagaccggatttgatgaggctcagtccatcctggaaacggaatacaccagcgaagtgcacctgaaggatcagcagaccgacatagagaagattaagactttccttgacgctttgcagaacctaatgcacctgcttaaatccctgtgcgttagcgaggaagcggaccgcgatgcggcattctacaacgagtttgatatgctgtacaaccaactgaaactagtggttcccctctacaataaagtaagaaactatatcactcagaagttattcagaagcgataagatcaagatctatttcgaaaacaagggacaattcctcggaggttgggtcgactcacagacagagaacagcgataacggaacccaggcagggggatacatatttaggaaggagaacgtcataaacgagtacgattattatctgggaatctgtagcgacccgaagctgttccgccgaacaacaatcgtgtcagagaacgacagaagctcattcgagaggcttgattactatcagctcaaaacggcttctgtttacggcaatagttactgcgggaagcatccttacaccgaggacaaaaatgagctggtcaactcgattgaccggtttgtgcacctgtccggcaacaacatccttatcgaaaaaatagctaaggataaagtgaaaagtaaccccaccacaaatacaccttcgggttacttgaacttcattcatcgcgaggccccaaatacttacgagtgcctactacaagacgagaatttcgtaagcctgaatcagagagtcgtaagcgctttaaaggccactctagcgaccttggtcagagtgcctaaagccttagtgtacgccaaaaaggattaccatctgttctcagagattatcaatgacatcgacgagcttagttatgagaaggccttttcgtactttcccgttagccagactgagtttgagaacagctcgaacaggacaataaagcccctgttgctgtttaaaataagtaataaagatctgagtttcgcagagaatttcgaaaaggggaacaggcaaaagattggcaaaaagaatttacacactttatatttcgaagcactcatgaagggcaaccaggacacgattgacattggaacggggatggtgtttcatagggtgaaatccctcaattacaatgaaaagacgctgaagtatggccatcactctacccaactcaatgagaagttctcctaccccattattaaagataaacggtttgcaagtgacaagttcctgttccacctgtccaccgagattaactacaaggaaaagagaaagccactgaacaattccatcatcgagttcctcactaataatccagatataaatattattggcctcgaccgcggggaaagacacctcatctatctgacgcttattaaccagaagggggagatcttgcggcagaagacattcaacatcgttggtaacaccaactatcacgaaaaattgaatcagcgcgaaaaagagcgggataacgcccgtaagtcttgggccacgattgggaagatcaaggaactgaaggaagggttcctctccctagtaattcacgaaatcgctaaaattatggtggaaaataacgccatcgtggtgttggaggacctgaatttcggcttcaaaagaggtcggtttaaagtcgagaaacagatctaccagaaattcgaaaagatgctgatcgacaagttaaactatctcgtgttcaaagacaaaaaggctaacgaagctgggggagttctgaaggggtatcaactcgcagagaagtttgaatctttccagaaaatgggtaaacagagtggctttcttttttacgtccctgctgcatatacatctaagattgacccaaccaccggatttgtgaacatgctcaaccttaactacacaaacatgaaggacgcgcagactctgctgtccggcatggacaaaatttctttcaacgccgacgccaattatttcgagtttgaactcgattatgagaagttcaagactaatcaaacagatcacactaataagtggaccatctgcacagtgggcgaaaagcgcttcacctacaattcagctaccaaagagacaaccacggtgaacgtgactgaagatctcaagaagctgcttgacaaatttgaggtgaaatacagcaatggcgataacatcaaggatgaaatctgcaggcagacagatgcgaaattcttcgaaatcattctctggctgctcaaattgaccatgcaaatgcggaactccaatacaaaaactgaggaggattttatactgagcccggtcaagaacagtaatggggagttctttcggtccaacgacgatgcaaatggtatctggccagccgatgccgatgccaacggcgcatatcatattgcgttaaaaggactgtatctagtcaaggagtgtttcaataaaaatgagaagagccttaagattgagcataaaaattggtttaagtttgcccagacccgtttcaacgggagcctgactaagaatgga

SEQ ID NO: 763 - DNA, 3939 bp, synthetic construct
  misc_feature 1..3939: note = Sequence codon optimized for human expression
  source 1..3939: mol_type = other DNA
atgttagacagattcaccaaccagtacagcgtaactaaaacgctcaagttcgagttacggccaatggggaaaaccctggagcacgtacagaaaaagggcttcgtggaaactgacgagaaactggcaactaattataagcggatcaagaagaccattgacgtctaccataaagacttcatcagccgtgccctgtcacagctctcaatcagcaatctggacgagtttttggcatcttatgaggataataagaagaaccctgacgacaaaacaaagaaacagctagtgcgcattcaagataacctgcggaagcagatcacttctgcatttacggctgccgagtttaaaacggagttctccgagctcttcaagaaagaacttctgaccaaaaacctggagagctttgtgttggaatataacaagaaaaatgatgctgaccttttctttgtggatgactttaagaattttgcgacctattttataggctttcacgagaacagaaagaatatctactccgcggatgcaaaacacaccgcgctggcctttagaatcatccatgaaaatttaccaaagttcatcgaaaacatgaattccctccagttgattaaggacgactatcccgcactgtacgagtcgctgcagaatcaggtgagtaccgagctgagcagcattttctctgctggcttcgtactagacgatgtccttaatattagtttctacaatgaacttcttagccaacagggaatcgatagatttaaccaactgatcgggggtgtttcaacccagagcggggccaaaaagactcagggcctgaacgagcttatcaacgagtacaaccaacagtctccacgcagtagcgggaatcgcaaagcccccaaaattcggccgctctataagcaaattctcagtgatcgcggctccctgtcattcctgcccgagaagtttgctgatgatcgcgagctgtacgatgctattaacgactattatctttcccacctactgatggtgcctaacgattcctccgagcataccctattggattcactgaaacacttggtggcctcgctgccctcgtttgatctgacgaaaatttacctgaagaatgataaggccatttcttctatctctaatcgcctcttcggagattatagcgtactgcctatcgctttaggatactattatgatcatcacattaaccctgaccacctagatcaactggccgccgcaaaatcacagaagaagactagtgacctgtacaaaaagaaggacgcctttaccaagggataccactctgtagcgacaatcgaggctgcctaccaggcctatttggccagcaccgactctgacaacgggctccgtaagagtgggattatcaaccccgtgcaagattactttacacgatacttcgttaatgagcccaaagaggatggcaaagcagccgttgacctgcttagggacattgataacaaatacactacgatcaaaggagtcctaaactccgaaattgaggagggaacacgacaactgcttcaaaaaggggctgaggttgctaatataaagcatttcttggatgccgttatgaatctaattcatttcgtcaagccgcttgggagtgtgatcgaagaggactcccttttagacattgacgcgaggttctataatgactttctcccgctctacgaggaactgaagctgttctttcccctctataacaaagttaggaactacataagccagaaaccttactcaaatgagcagtttaaactgaatttcgaaaacgcaaatctgctagaagggtgggatgtgaacaaggaaaagtccaggttgtccgtgttgttacagcgggacggacgttactacctggctctgatggacaagagccataaaaaagtgttcgaacaagcacctgaaataacaccaggcagcgagaactcaaactctccatatcagaagatgaggtataagcttctgcccggtcctaataagatgttccctaaggtgtttttcgcaaagggcaatattgactattttgccccttcccagcagttgctagaaaattatgagaagggcacacacaaaaagggcgacgacttcaacatcgagcattgccaccagctgatcgacttctttaagcagagcgtggctaagcacaaagactggcatgagttcggcttcaaattttccgacacttccacctacaaggatatatctgaattttacaacgaagtgtctaagcagggatataaggtcacattcgaggatgtcgacgctgattatattgatacattagtggaaaatggacagctgtaccttttcgagatctataataaagatttcagcgttaattctagaggtaaacctaacctccataccatctatttcaaagctctgttcgatgacgagaacctcaaggatgccgtctataagttgaacggggagggtgagttgttttaccgcaaggcgtcaatcgatccagaaaatacaattaagcataagaagggggaaagagtctacagcaaaaaccccctgacaccagatgcttcaagagtgttggattatgagatagtgaaagataaaaggtacactgctgacaagtttctgctgcacctgccagtcaccatgaattttaaagccgacggcatcgggcccggccagttcaacaacctcgtgaaggacaccatccgggatgatcagaataaagacatgcacctcatcggtatcgacaggggggagcggcacctactgtatttaacagttatcaaccaggacggattgatcattcatcaagaatcgttaaacgacgttgtgagctcaaacaagacagtcactccataccacacgctgctggacacacgggaaaaagaacgcgatgacgcccgaaagaactggggagtgatcgagaacataaaggaccttaagaagggctatctgagtcaggtagtgcacaagttggccaaactcatttatgagtataacgccgtggtcgtcctggaggacctgaactttggattcaagaggggcagatttaaagtggagaaacaggtatatcaggccttcgaaaaggcactcatagacaaactcaactacctcgtgtttaaagaatttgagtccgacgccctcgggggcgcaagaaaggccttacaactcacctctgcattcaccgccttcaaagatcttggtaagcagacagggttcctcttttacgttcctgcatggaataccagtaagatcgaccccgttactggatttgtagacctgctcaagccaaaatatgagaatgtcgagcaggcaaaagactttatcgatcggtttgactctattcgctataataaagaaaaggatttctttgaattcgaatttgattactccaacttcggcacccgagcgcaagacactcgaacagactggacgatatgtagccacggtactaagaggtacgtgtacgataagaatgctaacaataataagggtggtcagaaacagatcgacgtgaataccgagttgaaagctctgttcagtagttacgacatcgattaccatggcgaactggcgggcagggatctgcgtccgatgatcaaaagcaagggcgataagagcatgtacagctccattattttcctcctgaaaaccttgctcgcaatgcgatacagtaagacaaacggcagcaaggtcgaagatttcattcttagtccagtgtcaaacgatgctggagtctttttcgacacaagagattacgacggaatggacgccgattcctcctcagaaacctccaccgtgctccccaaggacgccgacgccaatggcgcctaccacatagcactcaaggggctgtgggtgatgcggcagatacagagccacactggagacgattacaaaggtctggatctgaagataactaataagaactggcttgaattcgtccaaacaaaaccctaccagaaa

SEQ ID NO: 764 - DNA, 3747 bp, synthetic construct
  misc_feature 1..3747: note = Sequence codon optimized for human expression
  source 1..3747: mol_type = other DNA
atgaaaaagattgattccttcactaactgctactccctcagcaagactctgaggtttaagcttattccaattggggctacccaatccaactttgacttaaacaagatgctggatgaggataagaaacgggcagaaaattattctaaagcaaaaagcattatcgacaagtatcaccgatttttcatcgacaaagtcctgagtagtgtgacggagaataaagcttttgactccttcctggaagacgtgagggcctatgccgaattatactatcgcagcaataaggacgatagcgacaaggcgagtatgaagacactggagtctaagatgcgaaagttcatagccctggcgctgcagagcgacgaagggtttaaggatcttttcgggcagaacctcattaaaaagactctaccagagttcctggagtcggatacagacaaggagatcattgcagaattcgacgggttcagcacctactttaccgggtttttcaataacagaaagaatatgtactcagctgatgatcagcccactgccatctcctatcgctgtatcaatgacaacctaccaaaaatcctcgacaatgttcgcactttcaaaaattcagatgttgcaaacatcttaaacaacaatctgaagattctgaacgaggacttcgatggaatctacgggacttccgcagaagacgtcttcaacgtggattatttcccttttgtgctgagccaaaaaggtattgaggcttacaattcgatcctcggaggctatacgaactctgacggctctaagataaagggcctgaatgagtatattaatctgtacaatcagaagaatggaaatattcatcggatccctaaaatgaagcagctgttcaaacagatcctatctgaacgcgaatccgttagctttatcccagaaaaattcgatagtgacgacgacgtattgagctcaatcaacgattactaccttgagcgggacggagggaaagtgctcagtatcgaaaagaccgtcgaaaaaatcgagaagctgttctcagccgtgactgattacagcaccgatggaattttcgtgaaaaacgctgccgaactcacggcagtgtgttccggtgcttttggttactggggaacagtccaaaatgcctggaataacgagtacgacgcgctgaacggctataaggaaaccgagaagtatattgataaaaggaaaaaggcttataaaagtgtcgagagcttctccatcgccgacattcagaaatacgccgatgtctcggagagctctgagacaaatgcggaggtaactgagtggttgcggaatgaaattaaggaaaagtgtaacttggcagtacagggatacgagagctcaaaggatctgattagcaaaccatataccgagtcaaaaaagttattcaacaatgacaacgccgtggaactgatcaaaaacgccctagatagcgtgaaagagctggagaacgtcctgcgccttctcctgggcactgggaaagaggaatccaaggacgagaatttctacggagagttccttccctgctacgagcgaatttgtgaagtagatagcctgtacgacaaagtgaggaattatatgacccagaaactgtataaaactgacaagattaaactgaacttccacaatcctcagttcctagggggctgggataggaataaggaggcagattatagcgctgtgctccttagacgcaactctttgtattatatcgccatcatgccgtccggctacaagagggtcttcgagaagatccccgcacccaaggcagatgaaacagtttacgaaaaggttatctataaattgttaccgggtcccaacaagatgctccccaaagtttttttttctaagaaaggaatagagacattcaacccacccaaggagattcttgagaagtacgagctagggacgcacaagacaggcgacggatttaatttggacgattgccgggccctcatagactactttaagagcgccatagacgtgcattccgactggtccaactttgggtttcgtttttcagatactagtacctataaaaacattgccgatttttataacgaggtgaaaaaccaaggatataaaatcactttttgcgatgtgcctgagagttacattaatgaacttgtggacgagggcaaactgtacctctttcagctgtacaataaggatttttcagaacacagcaaaggtaccccgaatctccacacactttactttaaaatgctgttcgatgaaaggaatttagagaacgtggtgttcaaactcaacggggaagcagaaatgttttatagggaggcctctatatccaaggacgatatgattgtccaccctaagaaccagccaatcaagaataaaaacgagcagaactctcgaaagcagagcacctttgaatacgatattgtgaaagaccggcgttacacagtggaccagttcatgctacatatccccatcactctcaactttaccgctaacggcggtaccaacataaataacgaggtgcggaaagctctgaaggattgcgataaaaattatgtgattggcatcgaccggggcgagagaaatctgctgtatatatgcgtggtagacagtgaaggccgaatcatagaacagtactccctcaacgaaatcataaatgagtacaacggcaacacatactccacagactatcatgctcttctggataagaaagagaaggaaaggttggagagtagaaaagcgtggaagacagtggagaatatcaaggagctgaaggaagggtatatcagtcaggttgttcacaagatttgtgaattggtagagaagtacgacgccgtgatagtcatggaagacttgaactttggcttcaaacagggtagatcaggcaaattcgagaagagcgtttaccagaaatttgagaagatgcttattgacaaactcaactactttgctgacaaaaaaaaatctcccgaggaaattggtagcgttctcaacgcctatcagctgactaatgcttttgaatctttcgaaaaaatgggaaagcaaaacggtttcatattttacgttcccgcatacctcacctccaagattgatcctaccaccgggttcgctgatcttttgcatccgtcatcaaagcaatctaaggagagcatgagagatttcgtcgggaggttcgactctattacattcaacaagaccgagaattactttgagttcgagctggactacaataagtttcctagatgcaacacagattatcggaagaaatggacggtatgtacatacggatcgcgcataaagacattccgcaatccagagaagaactctgagtgggacaacaagaccgtcgaactcacgcctgcctttatggcccttttcgaaaagtactcaatcgacgtcaatggcgatattaaggcacaaatcatgtccgtcgacaagaaggatttcttcgtggaactgatcggcctcctgcgcctgaccttgcagatgagaaattctgaaaccggaaaagtggatagagattatctgatctcaccagtcaagaattccgaaggcgtgttttacaattccgacgactataaaggcatcgagaatgcgagtctgcctaaggatgccgacgcgaacggagcctacaacatagccagaaagggcttgtggatcattgagcaaatcaaagcctgcgaaaatgacgcagagctgaataagatccgtttagccatcagtaacgctgaatggttagagtatgctcagaagaaa

SEQ ID NO: 765 - DNA, 3906 bp, synthetic construct
  misc_feature 1..3906: note = Sequence codon optimized for human expression
  source 1..3906: mol_type = other DNA
atggccgcattcgataagttcatccatcagtaccaggtgtcgaagaccttgcgattcgctctcatacctcagggcaagacactcgaaaacactaaaaataacgtgttgcaggaggatgacgaacggcaaaaaaactatgagaaagtgaaacccatcctcgatcgtatctataaagtttttgctgaagaaagtctgaaagactgttccgtagattggaatgacttaaacgcctgcctggacgcgtatcagaagaacccgagtgctgataagaggcaaaaggtcaaggctgctcaggacgccctgagagacgaaatcgctggatatttcaccggcaagcagtatgcaaacgggaagaacaaaaatgccgttaaggagaaagagcaggcagaactttacaaggacattttttcaaagaagatcttcgacggcacagtgacaaataacaaattaccacaagtgaacctgagcgccgaggagacagaactactgggttgtttcgacaagttcacgacctactttgtgggcttttaccaaaacagagaaaatgtgttcagtggcgaagacattgctacagcaatcccgcacagaatcgtccaagataatttcccaaaatttcgcgagaattgccggatctaccaggacctcatcaagaatgagcccgcactgaaaccactgctacaacaggcagctgcagccgtgatggcgcagaacccgaaggggatctatcagcctagaaagagccttgacgatatcttcgtgattcctttttacaaccacctcttgctgcaggacgacattgactattttaatcaaatattgggcggaattagcggagccgcgggacagaagaaaattcaggggttaaatgagacaatcaatctctttatgcagcagcatccccaggaagctgacaagctcaagaagaagaaaatccgacacagattcatccccctgtataagcaaatccttagcgacaggactagcttttctttcatcccagaggccttcagtaattctcaggaagctctcgatggcattgaaactttcaagaaaagcctgaagaagaacgacacatttggagctctagaacgcctgatccagaatctggcatcacttgatctcaaatatgtctatctgtcaaataagaaggtgaacgagatctctcaggccttgtatggggagtggcattgcatccaggatgtcttaaaacaggactttagcctggaatcattgattcaaatcaaccctcaaaattctagtaacggcttccttgctacactgaccgacgagggaaaaaaacgcatatctcagtgtagaaacgtgctgggcaatccactccctgttaaattggcggacgaccaggataaggcgcaggtgaaaaaccagctggataccctgctcgccgcagtgcactacctggagtggtttaaggccgacccggacctggagacagacccaaacttcacagtcccttttgagaaaatctgggaggagctggttcccctactctccctgtactcaaaagtacggaactttgtcacgaagaagccatacagcaccgcaaaatttaaactcaatttcgctaatccaacacttgctgatgggtgggatattcataaggagtctgacaatggagcacttctgtttgaaaaaggcggcctttattacctggggatcatgaaccccaaggataaacctaattttaagagttaccagggcgctgagccttactatcagaaaatggtgtatagattttttcccgattgttccaaaactattcctaaatgcagtacccaacggaaagatgtgaagaagtacttcgaagatcacccccaggccacttcataccagatacacgactccaaaaaggaaaagttcagacaagatttcttcgagatccccagggaaatctacgaattaaacaacaccacttacggcactggtaagtccaaatacaaaaagtttcagacccagtactatcagaagacacaggacaagtcaggataccaaaaagccctaaggaagtggatagacttttctaaaaagttcttgcagacctatgttagcacaagcatattcgactttaagggtctgaggcccagcaaagactatcaagacctaggcgaattctataaggatgtaaatagtcggtgttaccgcgtgacgttcgagaagattcgagtgcaggacattcacgaggctgttaagaacgggcaactgtacctcttccagctctataataaggattttagtcccaaatcacatggactgcccaatctccacactctgtactggaaagccgtgttcgatccagagaatctaaaggaccctattgtcaaattaaacgggcaggccgagttattttaccgccctaaatctaatatgcagataatccagcacaagaccggcgaggagatagttaataagaaattgaaggacggaacccctgtgccggatgacatttaccgagagatctccgcttacgttcaaggtaaatgccaaggcaacctctcaccagaggcagaaaaatggcttccatcggtaactattaagaaggcagcacacgatataactaaggataggcgttttaccgaggataaatttttcttccatgtacccataaccctgaactatcagtcttccgggaagcccacagccttcaatagccaggtgaatgactttctcaccgagcacccagaaactaatataattgggattgatcgcggcgaaaggaatctgatttatgccgtggtgataaccccagacgggaagattttggagcagaaaagcttcaacgtcattcacgatttcgactaccacgaatccctgtcccaacgggagaaacagcgggtcgcggcccggcaagcgtggaccgcaattgggcgtatcaaggatcttaaggaaggataccttagcctggttgtgcatgagattgcccagatgatgatcaaatatcaggcagtggtagttctcgaaaacctgaacacggggttcaaaagggtcagaggcggtatttccgagaaggcggtttaccagcagttcgagaagatgctgatcgagaagcttaacttcctggtgtttaaagacagggccatcaaccaggagggcggtgtgctgaaggcctatcagctcactgactcctttacctcgtttgctaaactgggaaatcagtccgggtttctcttctacatcccatccgcctatacatccaagattgatcccggaacgggtttcgtcgacccttttatttggagccatgtgacagcttcggaagaaaaccggaacgagtttcttaaggggtttgattctctaaaatacgacgctcagtcctccgccttcgtcctccatttcaagatgaagagcaataagcagttccagaagaataacgtagaaggattcatgcctgagtgggacatctgcttcgaaaagaacgaagaaaaaatcagcctgcagggcagtaagtacactgccggtaaacgtatcatatttgattctaaaaagaagcagtatatggagtgctttccccaaaatgagttgatgaaagccctgcaagatgtgggaatcacgtggaacaccgggaatgatatctggcaggatgtcctgaaacaggccagcactgacaccggattcaggcatcggatgattaatctgattcgatctgtgttgcagatgagatcaagcaacggtgcaaccggtgaggactacattaactcacccgtcatggatttggatggcaggtttttcgacacacgagccggcatccgcgaccttccgctggatgccgatgccaacggagcatatcacatcgccctgaaagggcgcatggtcttagaacgcattcggagtcaaaagaacacggccatcaaaaacaccgattggctgtacgcgatacaggaggagagaaat

SEQ ID NO: 766 - DNA, 3729 bp, synthetic construct
  misc_feature 1..3729: note = Sequence codon optimized for human expression
  source 1..3729: mol_type = other DNA
atggtcgcattcgtcgatgagttcgtgggacagtatcccgtcagcaagacgttacgcttcgaagcacgtcccgtgccggaaaccaagaagtggctggaatccgaccagtgtagtgttttatttaatgaccagaagcgtaacgaatactacggtgtgttgaaagagctgctagacgactactaccgcgcatatattgaagacacactggctgcgttcactctcgacaaagccctgcttgagaacgcctacggcctctattgcaatagagataataatgcctttagctcctgttgcgagaagctgagaaaggatttggtcaaggctttcgcgaacctgaaagactatctccttgggtcggaccaattaaaggacctggtgaagctgaaagcgaaggtggctgatagcgctggcaaaagcaagaagaaaattgaggtagacagcaggttactggcttggttaaaaaacaatgctaaatacagtgccgaggatcgtgttaagtactgcgaggctatcgaggcattcgagggcttcgtaacctatctcaccaattataagcaggcccgggagaacatgttctcctctgaggataagtcaacggcaatcgctttcagagtgatcgatcaaaacatggtgacctatttcggcaatatacggatctacgagaaaatcaaagccaagtatcctgagctgtacagcgctctgaaggggtttgagaaattcttttaccctgccgggtattccgagatcctttcacagaataaaatcgacgaatacaattacaaatgcattgggcgccccgtggaggacgccgattataagggtgttaatagcattatcaatgagtatcgacagaaaaaaggcatcaaaagcagggagctacctgtcatgagtatgctgtataagcaaattctctcagatagggataatgactttatgtctgaggtgatcacaagcaatgaggaggccatcgaatgtgctaaggctgggtacaaaaagagttatatactgtttaacgagctgctccaattgtttaacaactctttcatcgaagaaaactatgaatacatctatataaagacacaaccactgactgagctgtcacagagtttgtttggagattggtcagtgctaaggaacgccctggacaatgccaagtacgacaaggagattattaatctggccgaactagttaggtactttagtgaatactgccagattctggatgcggacgacgccgtcaagatcaagaacaagttcatcctggaagactactttgtgcaggatacactggaagctgcattgcctgacctcgataagattacgcagtataaaacctatctcgacaacatgctgcaagttatcagaaaatataggctgttctccatgtataatggacgcaaaaagctcgatgtgcctgaaaagggcatggatttctcaaatgaattcaatgacatatacgataagctgtctgagttctctattctctacgaccgaatccgcaacttcgcgaccaagcggccctattccgacgagaagatgaagctgtcattcaacatgcccactatgctagccggctgggattacaacaacgagactgccaacgggtgttttctgttcatcaaggacggcaagtattacctcggcgttgctgactcgaaatcgaagaacatttttgatctcaaaaagaatccccacctgtgggacaaatattcctttgaaaacgccttttacaagataaaatataaacagattagcggggcagccaagatgttgcctaaaaccttcttgccatccaaagggaagccactcagcgaagaaaagaagaaaaagtatggtcacctggtcacagaccggatcatcgaaattcgtgataatggactgtatatgaaaagcgcaggagacagaaaagcggtgattgaatggattgacttcatgaaatcagccattgccatccatccagagtggaacgaatactttaaatttcatttcaagaataccgaggaatacgcctccgcaaatgagttctacgaggatatggataagcagacatactctcttgaaaaggtcaagatccctgccgcatacgtagacgaactggtcagtcagcacaaactttacctctttcaactttataccaaggactttagcgacaagaagaagaaaaaaggaactgacaatctccacactatgtactggaacggtgttttcagtgacgagaaccttaaagcgatcgctgaaggcacaaagccaataattaaactcaatggcgaggctgaaatgtttatgcggaacccctccattccacgaaaaataacacacgaaagaaacaagccgatcgctaacaaaaatccattgaacaataaaaaggagtctcttttttcctacgatctgattaaggacaagcggtatactgaacgaaagttctatttccattgccctatcacactaaactttcgcgcggccaagccgacgaaatacaatgagaaaattaatcggttcgtggagaataaccccgacgtgtgtatcataggaatcgatagaggcgaacggcacctcctgtattacaccgtgatcaatcagaccggggatatactggagcagggtagtctgaataagatcagctcaagctatacaaacaacaagggcgagaaggtaaacaaagaaaccgactatcatgccctgctcgataggaaagaaaagggcaagcatgctgcccaacaggcatgggaaaccattgaaaacataaaggagttgaaggcaggttacctgagccaggtggtgtataaattgactagactgatgcttaaatacaacgccgtaattgtactggagaatcttaacgtgggattcaagcgaggccgaactaaagtagaaaagcaggtctaccagaagttcgaaaaggcaatgatagataaattgaattacttagtgtttaaagaaagaggatacgagatgaacggaagttacgcaaaaggactgcagcttaccgataaatttgagagtttcgagaagatcgatattgataagcagaccggatgtatctactacgttatccaatcctacacatctcacatcgatccaaaaacaggttttgtgaacctgctcaatagcaaattaaaatacgagtccgtctccaaggcccaggagactattcggaaatttgataggatctcttataacgcaaaagcagactactttgaattcagctttgactatggcaagttcggaatagatatgtttagaaatgagtgggttgtctgtacctgcggtgactggaggtgggagtattcggcaaaagaccgcgagacaaaagcctactgcgtgaccgacaggctcaaggagttgttcaaaagccacggcattgactatgtggggggtgaaaacattgtttcaaagattgctgatgtcgctgacaagaggttcctgtctactcttttgttttacctacgcctcgtgttcaaaatgcggtatacagtgtcaggcacggataatgagaatgatttcatcttatccccagtggagtacgcccccgggaagttcttcgactccagagaggccgccgcgactgagcccatgaatgccgatgctaacggggcatatcacatagccctaaaggggcttatgaccatccgcggcattgagaacggcaagctgcataagtttgggaaaggaggggagaaggcagcttggtttaaatttatgcagaaccaggaatacaagaacaacgga

SEQ ID NO: 767 - DNA, 3909 bp, synthetic construct
  misc_feature 1..3909: note = Sequence codon optimized for human expression
  source 1..3909: mol_type = other DNA
atgaataacggaacaaacaactttcagaactttatcggcataagttctctccagaagactttgcggaacgctcttatccctaccgagacaacccagcaatttattgtgaaaaacgggatcatcaaagaggatgaattgcgcggagagaacaggcaaattctcaaagatattatggacgactattatcggggcttcatctctgagacattatcctccattgacgacatcgattggacttctcttttcgaaaagatggagatacagttaaagaatggcgataacaaggacaccctgattaaggagcaggccgaaaagaggaaggccatctacaagaagttcgcggatgacgaccgctttaagaacatgttctctgctaagctgatttctgatattctgccagagttcgtcatccataacaacaactactcagcctcagagaaagaagagaagacacaggttatcaaattgtttagccggtttgcgacgagcttcaaggactactttaaaaacagggctaattgctttagcgccgacgatatttccagctcttcatgtcatagaatcgtgaatgacaacgctgagatcttcttttccaacgccttagtgtaccggcgcatagtcaagaacctcagtaacgatgacattaacaagatatccggagatatgaaagattccctgaaggagatgtcattggagaaaatctattcctatgagaagtacggcgagttcatcactcaggaagggatcagtttttacaatgacatatgcggcaaggtcaactcctttatgaatttatactgccagaagaacaaagagaataaaaacttgtacaagctgcggaagcttcataagcaaattctctgcatagcggatacttcctacgaggtcccctataagtttgagtctgatgaagaagtgtatcaatcagttaacggttttctggacaacatttcatctaaacatattgttgagagactgcgtaaaattggggataattacaatggttataaccttgataaaatttacatcgtgagtaaattttacgagctcgtgtctcagaagacatatagagactgggagacaataaacaccgctctggagattcattacaacaacatcctgcctggtaatggaaagagcaaggccgataaggtcaagaaggctgtgaaaaacgatcttcagaagtcaatcaccgagatcaatgaattggtgagcaattacaaactgtgccctgacgataatatcaaggcggaaacctacatccatgagataagccacatccttaataacttcgaggcgcaggagctgaaatataaccctgaaattcatttggttgagagtgaactgaaagcctccgagctcaaaaatgtcctggacgtgatcatgaatgccttccactggtgttccgtctttatgaccgaagagctcgtggataaggataataatttctatgcagaactcgaagagatttacgatgagatttacccagtgattagtctttacaacctcgtgcgcaactatgtgactcagaagccctattccaccaagaaaataaagctgaattttggcattcccacgctggccgatggctggagtaaatccaaggagtatagcaataatgcgataatactgatgcgagacaatctttattatctcgggatcttcaatgccaaaaacaagccagacaaaaaaattatagagggcaacacgagtgagaacaagggagactacaaaaaaatgatctacaacctgttgcctggtccaaacaagatgattccaaaggtcttcctcagttctaaaacaggggttgagacctacaagccttctgcatatatactcgagggctacaagcagaataaacacctgaagtcctctaaggatttcgacattacattttgcagggacttgatcgattatttcaaaaattgcatcgctatacatcctgagtggaagaattttggctttgatttttccgacacatcaacatatgaagacatatcaggcttttacagggaagttgaactgcagggctacaaaatcgattggacatatatttccgagaaagacatcgacttattgcaagaaaagggtcagctgtatctcttccagatctacaacaaggatttctccaaaaagtccacgggcaatgataacctccacaccatgtacctcaagaatcttttcagcgaagaaaacctgaaggatatagtattgaaattgaatggcgaagccgaaatcttctttcggaaaagcagcataaagaatcccataatccataagaagggctcaatattggtgaacagaacatacgaggctgaagagaaggatcagttcggaaacatacagatcgtgcgaaaaaccattcctgagaatatttaccaggagctgtataagtacttcaacgacaaaagcgacaaggaattatccgacgaagccgccaagttgaagaatgtagttggtcaccatgaagcagcaactaacattgtgaaggactatcgctatacctacgacaagtactttcttcacatgccaatcacaattaactttaaagcaaataagacgtcttttattaacgacagaattctccaatatatcgccaaagaaaaggacctccatgtgattgggatcgaccgcggcgaacggaatcttatttatgtctcagttattgacacatgtggcaatatcgtggagcagaaatcattcaacatcgtgaacggctatgactaccagatcaaactgaagcagcaggaaggggcacggcagatcgcacgcaaggagtggaaagaaattggaaaaattaaagagatcaaggaaggctatctgagcctggtcatccacgagattagtaagatggtaatcaaatacaatgcaatcatcgctatggaagatttatcatatgggtttaaaaaaggaaggttcaaagttgagcgccaggtgtaccagaaatttgaaaccatgctcattaacaagctcaactatctggtgttcaaggacatctctatcaccgagaacgggggtttgttaaaagggtaccagcttacttacataccggaaaaactgaaaaacgtcggtcatcaatgcggttgcatcttttatgttcctgcagcatatacgagcaaaatagaccctactacagggtttgtgaatatttttaaattcaaggatttaacagttgatgccaagcgagagttcatcaagaaattcgattccatacgatatgactcagagaagaacctgttttgctttaccttcgactacaacaacttcatcactcagaatacagtgatgtccaaatccagttggtctgtttacacttacggcgttcgcattaaacgccgctttgtgaatggccggttcagcaatgagtccgataccattgacatcaccaaagatatggaaaaaacactcgagatgaccgatattaactggcgggacgggcacgatctccgccaagacatcatcgattatgagatagtgcaacatatttttgaaattttcagacttactgttcagatgcggaacagcctctcagagctcgaggacagagactatgatagactcatcagtcctgtgctgaatgagaacaacatcttctacgacagtgccaaagctggggacgcactccccaaagacgctgacgctaatggggcgtactgcatcgccttgaaaggactgtatgaaatcaagcaaattaccgagaattggaaggaggatggtaagtttagtagggataagctcaaaatctcaaacaaagactggtttgatttcatccagaataaaaggtaccttaaacgtccggcagcgactaagaaggcggggcaagctaagaagaaaaagggtagcggacctgctgccaagagggtcaagttggacggcagcggcctcgagcaccaccaccaccaccactga

SEQ ID NO: 768 - DNA, 3711 bp, synthetic construct
  misc_feature 1..3711: note = Sequence codon optimized for human expression
  source 1..3711: mol_type = other DNA
atgggagaggtaaagcttactaagttggctgaattttacgatgtgtatctcaaattccgcaaaaatcccaaggatgatgggctccagaagcagttaaaagatctccaggcagtgctcaggaaggagattgtgaagccaataggaaatggcgggaaatacaaagcaggatatgaccgtctgtttggggctaaacttttcaaagatggcaaggagttaggcgacctggccaagttcgtgatcgctcaggagggagagagttctccgaaacttgcgcatttagcgcattttgaaaagtttagtacttatttcaccggttttcacgacaatagaaagaatatgtacagtgatgaagacaagcatactgcaatcgcttacagactcattcatgagaacctccctcggttcattgacaacctgcaaatcctcgctacaataaagcagaaacacagtgccttatacgaccagattatcaacgaactgacagcttctgggctggatgttagtctggctagtcatctcgacgggtaccacaagctgctgactcaggagggaatcactgcatataacactctgctgggcggtatctctggcgaggccgggagtcgaaaaattcaagggatcaatgagctcatcaactcccaccataatcagcattgtcacaaatctgaaagaattgcgaagctcagacccctccataagcagatcctgtcagatgggatgggagtgtcatttctcccatctaaattcgccgacgattcagaagtgtgccaagccgtcaacgagttctatagacattacgccgacgtgttcgcgaaggtccagtcactgtttgacgggtttgacgactatcagaaggatggtatatacgtcgagtacaaaaacctcaatgaattatccaagcaggcttttggggacttcgccctgctcggccgcgtcttagatggatactacgtggacgtcgtgaatccggagtttaatgaacgctttgcaaaagcgaagaccgacaacgccaaggccaagttaacaaaagaaaaagacaagttcattaagggtgttcattctttagcttccctcgagcaggctatcgagcactacacagcccgacatgatgatgaaagcgttcaggctggaaaactggggcaatactttaaacacggtctcgccggagtggataaccccatccagaaaatccataacaaccatagtacaattaagggctttctcgagcgcgagagacctgccggggaaagagccctccctaaaatcaagagcgataaatctccagagatacggcagctgaaagaactcctcgacaacgctctgaatgtggcgcacttcgctaagttgctcaccaccaaaaccaccctccacaatcaggatggcaacttttacggtgaatttggagcactttacgacgagctcgccaagattgccacgctctataacaaagtcagggattacctgagtcagaagcctttctctacggagaaatataaattaaactttggaaatccaactctgctgaacgggtgggacctcaacaaggaaaaggacaacttcggagtgatccttcagaaggatggctgctactatctcgccctgctggataaggcacataagaaggtgtttgacaatgcccctaatactggtaagagcgtgtatcaaaagatgatttataagctgcttcctggccctaacaagatgctgccaaaggttttctttgctaagagtaatttagactattacaaccccagcgcagaactcctggataaatacgcccaaggtacacataagaagggggacaactttaatctgaaagattgccatgctctcatcgacttctttaaggcaggcattaacaagcatcccgaatggcagcacttcggtttcaagttctctcccacaagcagttaccaggatctgagcgacttttacagggaggtagaaccacaaggttaccaggttaaatttgtggatattaacgccgactacattaatgagctggtggaacagggccagctgtacctgttccagatttataataaggatttttctcccaaggctcatggaaaaccaaatctgcatactctgtactttaaggctttatttagcgaggacaacctcgtcaacccaatctataagctgaatggcgaagccgagatcttctatagaaaagccagcctggacatgaacgagactacaatccaccgggccggcgaggtcttagaaaacaagaacccggataaccccaagaaaaggcagtttgtgtatgacataataaaggataagcgttatactcaggacaagtttatgctgcatgtccctattacgatgaatttcggcgtgcaaggcatgactattaaagaatttaacaagaaggtgaaccagagtatccaacaatatgatgaggtcaacgttatcggaattgaccggggagagcggcaccttctgtatcttacagttattaacagtaagggagaaatcctcgagcagcggagcctgaacgacatcaccaccgcatccgcaaatgggacccagatgactaccccataccacaagatccttgacaaaagagagatcgaacgcctgaacgcaagggtgggctggggtgaaatcgagacaattaaagaactgaaaagtggctatctttcccacgtggttcaccaaatcagccagctgatgcttaagtacaacgctatagtggtccttgaggatctgaattttggctttaagagaggccgtttcaaggtggagaagcagatttaccaaaattttgaaaacgctcttatcaaaaaattaaaccacttagtcctgaaagacaaagcggatgacgagatagggagttacaaaaatgctctgcagttgactaacaactttaccgaccttaaatcaatcggcaagcaaactgggttcctcttctacgtcccagcctggaatacctccaagatcgaccccgagactggctttgtcgacctgctgaaaccccggtatgaaaacatcgcgcaatcccaggcattctttggcaagttcgacaaaatctgttataacgccgatcgaggttattttgaatttcatatcgactacgccaaatttaacgataaagctaagaactcacgccagatttggaagatatgcagtcacggcgacaaacggtatgtttacgataaaactgcaaaccagaacaagggcgcaaccatcggagtcaatgtgaacgatgaactcaaatctttgtttaccaggtatcatattaatgacaaacagccaaacctcgtaatggatatctgtcagaataacgataaggagtttcacaagtcattgatgtacttgctcaagaccctgctggcacttaggtatagcaacgcatcatccgatgaagacttcatcctctctcctgtggctaacgacgagggtgtgttttttaattctgccctggcagatgatacacagcctcagaatgccgacgccaacggcgcctatcacattgccctcaaaggcctttggctcctgaatgagttgaaaaatagcgatgatttaaacaaggttaaattagccatagataatcaaacatggctgaattttgctcagaaccggaaacgtccggcagcgactaagaaggcggggcaagctaagaagaaaaagggtagcggacctgctgccaagagggtcaagttggacggcagcggcctcgagcaccaccaccaccaccactga

SEQ ID NO: 769 - DNA, 4221 bp, synthetic construct
  misc_feature 1..4221: note = Sequence codon optimized for human expression
  source 1..4221: mol_type = other DNA
atggagaagtctcttaatgacttcatcgggctttactctgtcagcaagacgctgagattcgagttgaagccagtgtctgagaccttggaaaatataaagaagtttcattttctggaggaggacaaaaagaaggccaatgattacaaagatgtcaagaaaataattgacaactaccataaatactttattgacgatgttctgaagaacgcatcatttaattggaagaagctcgaagaggccattcgcgaatataataagaataaatccgatgattctgcattggtggctgaacagaagaagctgggcgatgcaattctgaaactctttacttctgataaacgatacaaagcattaaccgctgccacccctaaagagttatttgagagcattctccccgattggtttggagagcagtgtaaccaggatttgaacaaggctgcgctcaaaaccttccagaagttcacatcttactttacaggatttcaagaaaacaggaagaatgtctactcagctgaagcaattcctaccgccgttccgtatcggatcgtgaatgataactttccgaagttcctccaaaatgtgctgatatttaaaaccattcaggagaagtgtccacagatcattgacgaggtggaaaaagagttgtcctcttatcttgggaaagagaagcttgccggaattttcacactcgagtctttcaataaatacctggggcaaggaggaaaggagaaccaaaggggtattgatttctataatcagattatcggtggggtggtggagaaagagggaggcattaacttacgtggggttaaccagttcctcaatctgtattggcaacagcaccccgactttaccaaggaagatcgacgcatcaagatggtcccactgtataagcaaattctgagtgacagatctagtctctcatttaagattgagtctattgaaaacgacgaggagttaaagaacgccctcctggagtgcgcggataagttagaacttaagaacgacgaaaaaaaatccatatttgaagaagtctgcgacttattcagttctgtgaaaaacttggatttgagcggtatctatattaacagaaaggatattaacagtgtctctagaatcctcacaggggactggtcttggttacaatcacgaatgaacgtctacgccgaggagaagttcacgaccaaagccgagaaggcgcgatggcagaagtcacttgacgatgagggggaaaacaaaagtaaagggttttacagcctgacggatctgaacgaagtcctggagtatagttcagagaacgttgccgaaaccgatatccgtattacagactattttgagcatagatgtcgttactatgtcgataaggagaccgaaatgttcgttcagggcagcgagctggttgccctgagtcttcaagaaatgtgtgacgacatcctcaaaaagcgtaaagcaatgaataccgtgctcgagaacctcagtagcgaaaacaagctcagggagaaaactgacgatgtcgcagttattaaagagtatctggacgccgtgcaggagcttctgcatcgtatcaagccactcaaggtcaatggcgttggagattccactttctacagcgtgtacgattccatctatagcgccctgagcgaggttatcagcgtttataataagacacgaaattacatcaccaagaaggccgcctcacctgagaaatacaagctgaacttcgacaacccaaccctggcagatggatgggacctgaacaaggaacaggccaacacttctgtgatcctgcgcaaggatggaatgttttatttaggtataatgaaccccaagaacaagccgaagttcgcagagaaatatgactgcgggaacgagtcatgttacgagaaaatgatttacaaacagttcgatgccacaaaacaaattcctaaatgtagcacacagaaaaaggaggtgcagaagtacttccttagcggcgctactgaaccctacatcctgaacgacaagaaatctttcaagtctgagctcataatcaccaaagatatttggtttatgaacaaccatgtgtgggatggagaaaagttcgtaccaaagcgagataacgaaacgcgccccaagaagtttcagattgggtactttaagcagaccggagacttcgatggctataagaatgcactgagcaactggattagtttctgcaagaatttcctccagtcctacctgtctgcaaccgtttacgactacaatttcaaaaacagtgaagagtacgaggggctggacgaattctacaactatctgaacgcaacatgttacaagttgaatttcattaacatccctgaaactgaaatcaacaaaatggtcagcgagggcaagctgtacctttttcaaatttacaacaaggacttcgcctctgggtccaccgggatgccaaatatgcacacactgtactggaaaaacctgttttccgacgaaaacctgaaaaacgtgtgtctgaagttaaatggtgaggccgagctgttttataggcccgcgggaattaaggaacccgtgattcacaaagaggggagctaccttgtgaacagaactaccgaggatggcgagagtattcccgagaaaatctattttgaaatctacaaaaacgccaatggcaagttagaaaagctgtcagatgaagctcaaaactacatctccaaccatgaagttgtgatcaagaaagccgggcacgagattattaaagatagacactatacggaacctaagtttcttttccacgttcccttaaccattaatttcaaagctagcgggaattcatacagcattaacgaaaatgttaggaaatttctgaagaacaatccggacgtgaacataatcggattggacagaggagagagacacctcatatatttaagcttgatcaaccagaagggggagattatcaaacagttcactttcaacgaggtcgaacgaaacaagaatggcagaacaataaaagtgaattatcacgaaaagctcgaccagcgggaaaaggaacgggatgctgccaggaagtcctggcaggccataggcaagattgcggaattaaaagaaggttatctgtcagctgtcattcaccagctgaccaagttgatggtggagtacaacgctgtggtcgtgatggaggatctgaacttcgggttcaagcgcgggagattccacgttgagaagcaggtctatcagaagttcgagcatatcctgattgacaagagcaattaccttgtctttaaggatagggggctcaacgagcctgggggagtgctcaacggttaccaaatcgccgggcagtttgagtctttccagaaacttggcaaacagtcaggcatgctcttttacgtcccagccggttataccagtaagatcgatcctaaaacgggtttcgttagtatgatgaattttaaagatctgactaacgttcataaaaaaagagatttcttttcaaaattcgataatattcattatgatgaagctaatggcagctttgtatttacattcgattataaaaaatttgatggcaaggcaaaggaggaaatgaagctgaccaagtggagtgtttacagccgggataaacgcatcgtgtattttgcaaagaccaagagctacgaagatgtcctgccaacggagaaactgcagaaaatctttgagagtaatgggattgattataaaagtggtaacaacatacaagatagcgtgatggcaattggcgcagaccttaaggagggggccaaacccagtaaagaaatctctgatttctgggacggactgctttccaacttcaaacttatccttcaaatgagaaattcaaacgcacgaacgggtgaggactacataatctcacctgttatggccgacgacggtacttttttcgacagtagggaagagtttaagaagggcgaagacgcgaaactccctttagatgcagacgcaaatggggcgtaccatatcgcactcaagggtttatccctgattaacaagattaatctttcaaaagacgaggagctcaagaagttcgatatgaaaatctccaatgccgactggtttaaattcgcccaagaaaaaaattacgcaaagaaacgtccggcagcgactaagaaggcggggcaagctaagaagaaaaagggtagcggacctgctgccaagagggtcaagttggacggcagcggcctcgagcaccaccaccaccaccactga

SEQ ID NO: 770 - DNA, 4152 bp, synthetic construct
  misc_feature 1..4152: note = Sequence codon optimized for human expression
  source 1..4152: mol_type = other DNA
atgaaaacgattgagaatttctgtgggcaaaagaatggatattctcgttcaatcacactccgcaatcgcctgattcccataggaaaaacagaagagaacattgagaagctccagttacttgacaacgacatcaaaaggtcaaaggcctatgtcgaggtaaagtcaatgatagatgattttcaccgagctttcattgaagaagtgctgtccaaagccaaactggagtggggacccctttatgacctgttcgatttgttccaaaatgagaaggataagcacaaaaagtctaaaatcaagaaagaactggagaccatccagggggtcatgcgcaagcaaatcgtaaagaagttcaaggacgacgatcgcttcgacaagttgtttaagaaagaaatattgactgaattcgtgccaaccgtgataaaggccgacgagagcggcaccatctctgataagcgagccgcccttgacgtatttaagggatttgccacctacttcactggcttccaccaaaaccgtcagaacatgtattctgaggaagccaaagcaacagccattagcaacagaattgtcaatgagaacttccctaagttctatgccaatgtgaaagtctttgagtgcctgcagaaggagtatccagccataatcacagagactgaagaagccctcagcgaaattttaaacgggaaaaaattagcggatattttttccgctgacggcttcaactcagtgttgtcacaaagcggcattgatttttacaacaccatcatcggcggcatcgcaggggaggcaggcacacagaaattacagggaataaatgaaaagatcaacctggcccgtcagcagctccccactgaggaaaagaataagttaaagcgaaagatgtcagtcctctacaaacaaatcctttccgacagaagtaccgccagcttcattcccattggatttgagagttctgacgaagtttacgagagtgtcaaacaattcaaagagcagagtctggataacgtgatctctgcggcaaaggaattgttcgagaagtcagactacgacctgagtcagatctatgtgcccgccaaagaggttaccgatttctccctgaaattgttcggcaactggagtattttacacgacggattatttttgatcgagaaagataattctaagaagacctttacagagaaacagattgaaaaccttagaaaagaaattgcgaaaactgattgcagcctcgcggacttgcagaatgcctacgaacgttgggcaaaagaaaacgacgtgaaggcagagaaaaccgtgaaaaactacttcaagattgccgagctgcgggccgacggtaagtccagggaaaaaacctctgtagagatcttgaataaaatagagtcaaccttcgagaagatagatttcgaaaagcgcgacaatctcatcaaagaaaaggaaaccgctacaccaatcaaagaattcctggacgaggtacaaaacctctaccactatctcaagctcgtcgactatagaggtgaggaacagaaggatactgacttttactccaaatacgatgagatcctgcagacactgagcgagatcgtccctctgtacaacaaagtgcgaaacttcgtcacgaaaaagccgaacgaggtgaaaaaagtgaaattgaatttcgacaatgtgagtctggctaagggctgggacgtgaataaagaaagcgattacacatgtattctgctccgtcggagtggcttgtactacctcggggttctcaacccaaaggacaagccaaagtttgatagcgagaacaacggagagacctctattaataaaaatgactgttacgagaaattagtctataaatacttcaaagatgtcacaacgatgatccccaagtgtagcacccaactgaatgatgtgaagcagcattttaagaactccaacgaggactacattctggaaaataacaacttcataaaaccccttgttatatctaagcgtatattcgatctgaataacaagacctttgacgagaaaaagatgttccagattgattactataggaatactggcgatctcaaagggtacacagaagccgtaaaagattggatatctttttgtatgactttcgtccactcatataaaagtacatgtatctatgacttctcctctttaggcgactgctcccagtttaagcaggtggaccaattttacaaggaaatcaatttactgctctataagatttggtttgtcaatgtgacagccgagaagataaactctctggttgacagcggtaaactgtttttattccagatctataacaaggattactctaccggcaaagacggagggaacgggagcaccgggaagaagaacctccataccatgtactgggagaacttattttctgaagagaacctccgggacgtttgcctgaagcttaacggagatgccgaacttttctggagggacgctaatcctgacgtgaaggatgtgtgtcataagaaggggtctgttctcgttaaccgaactacttctgacggagagacaatccccgaggagatataccaagaaatttacaagttcaaaaatccaaataagcaggaaaagtcctttaagctgtcagatacagctaaggaattactcgactcaggtaaggtcggcttcaaggaggcaaaatttgacataattaaggaccggcacttcacacagaagacctatttgttccactgtcccatcactatgaacttcaaagcacccgagatcaccggtaggaaattcaatgagaaggtgcaacaggtgcttaagaacaaccctgacgtgaaggttattggattggaccggggagaacgtcacctgatttacctgtccctcattaaccaaaagggggagattgaactccagaaaacactgaaccttgtggagcaagttcgaaacgacaagaccgtctcagtgaactatcaagagaaattggtgcaaaaagaaggcgagagaggaaaggcccggaaaaactggcagacaatttctaatataaaggagcttaaagagggttacctgagtaacatagttcacgagattgctaaactgatggtggaaaataatgcaatcgtggtaatggaagacctgaactttggtttcaagcgcggccggttcgctgtcgagcgccaggtctatcagaaatttgagaatatgctgattgaaaagctcaattacttggtgttcaaggataagaaagtcgcggagcctggcggtgttcttaatgcctaccaactcacagacaaggtcgccaacgtatctgatgtagggaagcagtgtgggtggatcttttacatcccggcagcatacacttctaaaatcgaccccaagaccggcttcgccaacctcttttacacagccggacttacgaacattgagaagaagaaagatttttttgataaatttgatagtatcagatatgataggaagacagactcctttgtgtttacgtttgattattccgacttcggagacaatgcggacttcaaaaagaagtgggagctgtactcaaggggggagcggctggttttcagcaaggctgagaaatctgttgtacatgtgaatccaacagaaaaccttaaagccttgtttgataagcaggggatcaactggagctccgaagacaatattatagaccagatacaggcggtgcaggctgagcgagaaaattgcgccttttacgacggactctaccggtcttttacagctatcttgcagatgcggaacagtgtgcccaacagttcaaaaggggaagacgattatttgatcagtccggtcatggccgaggacggctctttctacgacagccgagaagaagctgaaaagggaaagacaactgacggaaaatggatcagtaagcttcccgtggacgcagatgccaacggagcctatcatattgctctcaagggcctctacttgttgcagaacaatttcaatctgaatgaaaatgggtatatcgagaacattagcaatgcggattggtttaagtttgtccaggaaaaggagtacgcaaagaaacgtccggcagcgactaagaaggcggggcaagctaagaagaaaaagggtagcggacctgctgccaagagggtcaagttggacggcagcggcctcgagcaccaccaccaccaccactga

SEQ ID NO: 771 - DNA, 4041 bp, synthetic construct
  misc_feature 1..4041: note = Sequence codon optimized for human expression
  source 1..4041: mol_type = other DNA
atgtccatttaccaggaattcgtcaacaagtactctttatctaaaactctcaggttcgagcttatacctcagggaaaaactctcgaaaatatcaaggctaggggcctgattttggatgacgagaagcgtgcaaaagattacaagaaagccaagcaaattatcgacaagtaccaccaatttttcatcgaggaaatcttaagcagtgtctgtatctctgaagacctgttgcagaactacagtgatgtctactttaagctgaaaaagtccgatgatgataatctgcagaaggactttaagtctgccaaagataccatcaaaaagcagatatccaaatatatcaatgattcagagaagtttaaaaatctttttaatcaaaacctgattgacgccaaaaaaggccaggagtctgacctgattctctggctcaagcagtccaaggataatggaattgaactgttcaaagcaaacagcgacatcacggatattgatgaggcccttgagattataaagagtttcaaaggttggacaacttacttcaaggggttccatgagaatcgcaaaaatgtgtactcttctaacgatatccccacatctatcatctatcgcatcgtcgatgacaacctccccaagtttcttgagaataaggccaagtacgagtccctgaaggataaggctccggaagcgattaactacgaacagattaagaaagatctcgcagaggaactgacattcgatatcgattacaagacgagcgaagtgaatcaacgtgtctttagcctcgatgaggtgtttgagattgccaacttcaataactacctgaatcaatctgggatcacaaaatttaacacaattattgggggcaaatttgtcaacggcgagaataccaagcggaagggcataaatgagtacattaatctgtattcccaacagatcaacgacaagacactgaaaaagtataagatgagcgtgctgtttaaacagatcttgagcgacactgagtctaaatccttcgtcatcgacaaactcgaggatgactccgacgtcgttactacaatgcaatcattttacgagcagattgcagcattcaagacagttgaagaaaaatcaataaaagagaccctctctcttctgtttgacgaccttaaagctcagaagctggatctttcaaaaatttattttaagaatgacaaatccctgacagatctgtcacagcaagtgttcgacgactatagcgttatcggtacagctgtgctggagtatattacccagcaggtagccccgaagaacctggataaccctagtaagaaagaacaagatttgatcgcgaaaaaaactgagaaagccaagtacctgagtcttgaaactatcaagttggccctcgaggagttcaacaaacaccgcgacattgataagcagtgtcgtttcgaagagatactgtcaaacttcgctgcaatccccatgatctttgacgagattgcccagaacaaggataatctggcccagatctctatcaagtaccaaaaccagggcaaaaaagacctcttacaggcaagtgctgaagaggatgtcaaggccattaaagacttgttggatcagacgaataacctgttacaccggctgaagatcttccacattagccagagcgaggacaaagctaacattctggataaggacgagcacttttatcttgtttttgaggagtgttactttgaacttgcgaacattgtcccactctataataagattcggaactacattacacaaaaaccctactccgacgagaagtttaagcttaattttgagaactcaaccctcgccagtggctgggacaagaacaaagagtcagcaaatactgcaattctgttcatcaaggacgataagtattatctgggcataatggataagaagcacaataaaatcttttcagataaagccatagaagagaataagggggagggctacaaaaagatcgtgtataaacagatcgcggatgcatccaaagatatccaaaacctgatgattatagatgggaaaaccgtgtgcaagaagggcaggaaagatagaaacggcgtgaaccgccagctgctgtctctgaaaagaaagcaccttcccgagaatatttaccgaataaaggaaaccaagtcatatctgaagaatgaggccagattctcacgaaaggatctttatgacttcatagattattataaagacagattggactactatgacttcgagttcgaacttaaacccagtaacgagtactctgattttaacgactttacgaaccacattgggagtcagggctataagttaacgttcgagaacatctcacaagactacatcaactccctcgttaacgagggcaaactctacttattccaaatttacagcaaggattttagcgcttattcaaaaggtcgtcccaatctgcatacactttactggaaagctctgttcgatgaacggaatcttcaggacgttgtgtacaaactgaatggcgaagcggaacttttctaccggaagcagtctataccaaaaaaaatcacccacccggcaaaggaaactattgcaaataagaataaagacaaccccaaaaaggagtccgtctttgagtatgatctgataaaggataaaagattcactgaggacaagttcttcttccactgcccaatcactatcaatttcaagagctctggcgctaataagtttaacgacgaaatcaatcttttgttgaaggagaaggctaacgatgttcatattctgagcattgaccgcggagagcgtcacctggcttattacaccctggtggacggcaaagggaatattatcaaacaggacaactttaacattatcgggaacgaccggatgaaaactaattaccacgataaactggcagcaatcgaaaaagaccgagatagcgcaagaaaggattggaaaaaaatcaacaatatcaaagagatgaaagaggggtatctgtcccaagtcgttcacgagatcgcgaaactggtaattgagtataacgctatcgtggtctttgaggatctcaactttggtttcaagaggggtcggtttaaagtggaaaaacaggtgtatcagaagctggagaaaatgctgattgaaaagcttaactatctggttttcaaggataacgagtttgacaagaccgggggggtgttgcgagcctatcaactgactgctccattcgagacatttaagaaaatgggaaagcagaccggaattatatattatgtacctgccggcttcacttcaaaaatctgccccgtcacgggatttgtgaatcagttgtaccctaagtacgaaagcgtgagtaagagccaggaattttttagtaagttcgacaaaatttgttacaacctggacaaaggatacttcgagttttccttcgactacaagaacttcggcgacaaggctgccaagggcaaatggactattgcctcattcggatcccgcctcatcaactttcgcaattccgacaagaatcacaactgggatacgagagaggtttatccaactaaggaactcgagaagctgcttaaggattactctatcgaatacggacacggggaatgcattaaggctgccatatgtggggagtccgataagaaattctttgcaaaattaaccagtgtgctgaatacaattctccaaatgcgcaattctaagaccggaactgagctcgattacctcatcagtcctgtggccgatgtgaacggtaatttcttcgacagtcggcaagctccaaaaaacatgcctcaggatgcagacgcgaatggggcctaccatatcggacttaaggggctgatgctgttggatagaattaagaataatcaagagggcaagaagctcaacctggtcattaagaacgaagaatatttcgagttcgtgcagaacagaaacaacaaacgtccggcagcgactaagaaggcggggcaagctaagaagaaaaagggtagcggacctgctgccaagagggtcaagttggacggcagcggcctcgagcaccaccaccaccaccactga

SEQ ID NO: 772 - DNA, 4059 bp, synthetic construct
  misc_feature 1..4059: note = Sequence codon optimized for human expression
  source 1..4059: mol_type = other DNA
atgaaagccgaaactaatctcactgagctggtcaatctgtacagcctgcagaaaaccctccgttttgagcttattccacagggggagaccctgcaaaacattgaaaagatgggaatactgacccaagacaatcagagaacagatgactatgagaaggtaaagactatcattgatgagtatcacaaacgcttcatcgaaatttgcttcaaagattttgtcttagaagatctggataagtaccaggaactttatataaccaagaataggtctgaacaggaaaatactgagttccagaaactcaagaccaacttacggaagcaagttgtcaacagattcaaggagaacgacaaacttaaaaggctttttagtaaggagttcattaaggaggatctggtcgagtaccttgatggccgggatgaggacaagaccagggtggaaaggtttaaggactttacaacttactttactggattctttgaaaatcgaaaaaacatgtactccgatggtgagcaaagcacagccatagcctacaggctcattcacgagaacctgcctaaattcatagacaatttgagcatcttcaacaagattgttgagcgcaacgaaattaaaaccaaattctctacgattgttaacgacctgaactgtcatctccatagcccaattaacagtatcgaggaagtgttcactattgattattttaacaagaccctcagtcagaagcagatagaggactacaacacaataatagggggggttagtaaaaacaatgagaaggttcaggggctcaatgaatatatcaacctgtataatcagcaacaaaaagacaagagcaaccggctgccccttctgaaaaagctgttcaaacagatcttgtcagatcgcgagcctatatcatggctccccgaagagctgtcctcagataaagatatggcgaacagcgtgttgaatctctacaaggaggtctacgagattatttattcaaatgacaattcactttacaatctgataacctacattgacaactatgacctttctaagatctacatctcaaacgaccagagccttaccactctgtcacagcgtatttataaccgctatgacatctatacattcgccataaaacagacgcttaaggagctgaacaggcagaaaaggaaagagaatatcgaaaagtacgaagctcggatcgataacttgtttgagaactgcgagtcttttagtatcgaggaactcaacaatattgttaagaatacatacaaggaaaacgaggagattgatacgtccaaaactatcgagcagtatttcaaagactttggcgccattaacaaagaacatattcagaaagaaaatttaattttgcagctggaaaacgcctttacggtggcaaagcccatacttgaggccatcgacgacaacaacaagggcatatctcaggataaagacgctgtcgataagataaaaaacctcctggacgttctcaaggacatccagcacttcgtcaagcccttactgggatccaacatcgaggccgacaaggacgaaaacttctatgggtccttctcagatatctatcagcgcctcgataaaattaccccgatatacaacatggtgcgaaattacctgacaaaaaagccgtactctgaagagaaaatcaaactcaattttgagaaaggaaatcttctgaacggctggattgattcttacaccgaaaagtctgataacggaacgcagtactctggctatctgtttagaaagctgaactccatcggagagtatgattactatctcgggatttccttggacacgaaactcttccgtaacactgacaacgtcgaagaaaacgacaaatcagaatttgagagactggattattaccagctcaagagtcagacatttttcggcaactcctataaaggcaaacagacatataataaggacaaagaagacatgataaccatcattgacgattttatagagcgcctgccaaatatccatcctctgaaagaacgatccaaaaataaacctgacacgtttacaccaaaccagtatcttacatacttcaaaaactaccaagaagagtacaactgcctgctgaaggacaaaaaattcaaaaataaaaacgaagaactgataaaaaatattattgagacaataaaatctatcaatcggctgccgaaggataagattaaagccattatttcaaagaactacaccgtgttctccgagataatcagcgatatccaggataccctgctgaaggaaaagatcttcaattatatctccgtgtctaagaaggcaatggaagccgcagctaagcgggagcaaaaaactctgtacctctttaaaatttctaacaaggacttgagttatgcggacacccattccaagggggatcgtaaatctcgcgggacagaaaatctgcatacgatctactttaaaacactcatgtccggcgagcaaaacgtgctggacatcggcgcaggagccatattctaccgtaagaaaactgaatggctcaaatcttcccccactcacaaggcaaatgaaaagattcagaataaaaactctcacaccaagtctgaattcgagtatggacttatcaaggacaaaaggtacattgaaaacaaatttctgttccatttgagcttgacccttaactaccagtccaaagggatcaagaacattaaccctatcgtcaacaacatgattcgcaataaagagatcaagcatatcattggcatagaccggggagaacgaaatcttctttacctttctctgatagatctgaaagggaacattgtcaagcagatgtcattgaatgagataatcaacgagtacaatggcaacaagtacaaaacggattaccatgatctccttgctaagaaagaggaggaaagaaagaaggctagattgagctggggaacaatcgagaatataaaggagctcaaggacggatatatatctcaggttgttcatattatatctcagatgatcgtaaagtataacgcaatagttgtacttgaggacttgaatttcggattcatgcgaggtcgccagaagatcgaaaaacaggtctatcagaagttcgagaagaaactcatcgataagttaaactattacgtggataaacagaaaaactcaaatgagataggtggcctttttcatgccctccagctcaccaataaattcgagagctttaaggacatggagaagcagaacggttgcctgttctatattccagcgtggaatacttccaaaatcgacccagtcaccggtttcgttaacatgtttgataccagctactgttctgtgaaagagagcaaggtgttcttcagcaagttcgatactatcaggtacaatgctaaagatgacttgtttgagtttgccttcgattacgataattttactacaaaagctcaggggaccaagacacaatggacactgtgtagttttggacagagaatcgagatttttcgaaacaaggaaaaaaacaacacctgggacaacaaagaaatcaacatcaatgatgaatttaagcagctgtttaatgagtttaatatcgatattaacatcaatgataacctgaagcaggaaattcagaaacagacctccgctgagttttttaagcgaattatgcacctgatgaagctgcttctgcagatacggaacagcatcacaggaagtacggagaagaatgatgattacattatcagcccagtagctgacgagaacggagtgttttttgattcccgtaaagtgaacgaacctgacaacctgcccatcgacgcggacgccaatggggcttataacatcgcccggaagggtttgtgggtagtaagacagatccagaacaccaaggacgaagacaagatcaatttggccatcagtaacaaggggtggttgaacttcgtgcagcagaagctgtatcttaacgacaaacgtccggcagcgactaagaaggcggggcaagctaagaagaaaaagggtagcggacctgctgccaagagggtcaagttggacggcagcggcctcgagcaccaccaccaccaccactga

SEQ ID NO: 773 - DNA, 3549 bp, synthetic construct
  misc_feature 1..3549: note = Sequence codon optimized for human expression
  source 1..3549: mol_type = other DNA
atgacaaacctgtaccctatagagaaaactgtatgtttcgagcttcgccccattggcaacactctggaacacttctataaaaacgagattatcgagaaggctcagaaccgatccgacgagtttcgcgagataaagcatttaattgatcccatacacaaagagattatagaagaatgcttccaggaactctcagaaaactccgagttcacacgcctcctggaaaaatacgaatttaagccccacgtaattaattcaaaaaagcccctgccccgagataagaagctgatagaggaaaacatctacaacaagaaggagattgtagagatcgtgaaggacaccttcagacacaaccccaaatacaaactgatcttctccgacaagaagatcgatatgctgaaggaatactacaaagacgactgcgagaaatttgaactgatctcccactttgaggaatttgccagctatttcgagaagtacgatataaagctgaagaatatttacggctgtgaggggaaaatctccaatacctgtaagtctatcctcaatagactgattacagacaacctccctatattttatttcaatactaagaaaaatattctcaccaaagttaagttcagtgcctccttcgagaacgtgaagtacatagacaaattcgcttcttacttctccattagcggcattgagaagtataacaagatcatcggcaatattaatgacgcggtgaataagctgaaccagaaaggtaaaaaatatagctacctcgggaagatgaaagacatctttgaccttgaccagtacagcgacatcgtaaagaagataagtgatgacaaagagctggtggagattatcaatatcttcatagacggacaggacatcgaagaactgaagaacaccttcagtaatctgaatgacaaatacaacctgaaaaagatcttcgttaggcgcgggaaagagcttgacgatttgctgaagcgaattgactttaagggcagggcacgcttgacaaccagctacgttaacctcttctacatcgatagcattaacaggaacaaggtcaagatctacgaggcaatctctgtaaagataaatgaattggttgacgactacatcaagaaatatgaggacgtaaaatacattttgaccgctaaatacgactccgggactaagattctggggcaaaatgacaaaaatatcgctaagattaaggagcttctcgagagcataaaggctatttacgatttcgtgagtatattcataccaaagaaggccgagaaccgggataacatagattacgaaaaagtgaatttcgatatttacaacaaaatcaactttgaacgactgtccattatcaaccagattttcaaccatttcaaggactacttcaccttaaaaaattttagcaccaagaaaattagattgaacttcaacgtggagcagttactgaacacgtgggatatcgataaaatcgacgaaacccttggcaccatcctcttgaaggaggaggaggagaagaccaagtattacctcggtatcttaaactcatctaactattctaaattcgagtatacagatgtcaaagagaacaattataggcagatgatctatacaagccagtctgaagaggagaaaaataaaaattataaaatctcattcaaatacatcaattctgcaaagattgatgaaatggtggaaaaggatgagatgtacctgttccagatctataataaggacttttccagctactccaatggaaactacaagctgaatacgatgtattggaacaacatcttcgattctaacaatatagaaaacattatcttcaacatcgctgggggggccacgatctttttccgagctaagtccttagaacgaagagagacgcacaagcagggcgaagtgctgagcaataaaaacaaggataaccagaagaccacctccatcttttcatacccactgataaagaataagcggtatactgaggataagatcaagcttcacgttcccatcgagatcaattgtaatagtaagaatcttaaccaacgcaagctgaactaccgcgtaaataaaaacatccagaatcttaaagaggtgaatataattggtatctcacggggaactaatgatctcctttatgccactgttatcaactctaaaggggagatcatcgagcagacatctctcggaaagattaagaacgtggtctttgataaaagtatcaacgcgacacgggagatcattagtgactataataaaataatagatacaaaggaaaaagaaagggagaatgccaataataggaacaagaccggcgaagaattaaaccttgagaagagcatcaaggatattaagaatggctacataagtcaggctgtgaatgtcattgcaaacctggtgaaaaaatacaatgcaattattgtgttcgaagacctcaatgataagaagtccgagaagattgagtcaaagattgagaagtccatctatcgaaatatccagaatgcagtcattactaaattgtcctatctggtcgataaaaaaaagaaagacaagttcgccgagggctccatcctcaatggataccagttgacctactactgcgagcaagatctggtcgagaagcaggaggactctgaagaaaagcaaaatggcatcgtcttctatgtgagtacatacatgacgaccaacatagatcccaaaacaggctttgttaactgtttcagcgtctctttacctaaatctatcgatggagtcaaagattttcttgaaaaatttaaggagattaagtttaatacaaaagaggggtattacgagtttgtcgtgaattacgaaaatatttccaagtacacacgctactttattggagaaaagctttcaaagaaagagtgggtgatctgttcttatggggatagaatcgaagaaagcaaagatattaatacaggtaaaaccaaatacaaaaagatcgatttaactaaggagttcaagtgtctgttcgagaagttcaatattgggcagggtaaaaagcttaagacaaatatcataaagtttctggaaaaccttgatctgggtagcggcctgcaagctaaaataaagggtaccaatcgtttcattaataagcagagcattcaacaggaagagttctgtcgggagttcatgcgactgtttgcactcatcttaaagctccagaacagcgatgggaaggaatcctatattattagtcctgtgaaagacagcgatggcaaattcttcgacagtcgcaagcataacgagtactcttcaatcgtgccagagaacgaaattagcaattcagcctataatatcgcacgaaagggtctgctgataatcaaccgtattaagaagacaaaggagcttgaaaggatagacctcaatttacgagatgagtactggctgaactttgtccagaataacaataaacgtccggcagcgactaagaaggcggggcaagctaagaagaaaaagggtagcggacctgctgccaagagggtcaagttggacggcagcggcctcgagcaccaccaccaccaccactga

SEQ ID NO: 774 - DNA, 4008 bp, synthetic construct
  misc_feature 1..4008: note = Sequence codon optimized for human expression
  source 1..4008: mol_type = other DNA
atgaaaggcgcgaaaatggggtacgaaaattttatcaataaaaattcttgtgttaaaacgctggttaatgagctgagacccaccgagtggacccgcaagcacattgaggaggacgccattctgagtgccgacgaactgagggccgaggaatccgacaaactgaagtctattatggacgattactatcgccgctatatttatactaaactctctggtgtgagttctctggattgggatgaattgttcagcattatggaggtagcctacaaaagtggtaagaaggataagaattgtaaggcccagttagaaaaggtgcaggaggaaatgcgcggcaagttctataacgtcctgtccgacgatgatatcttcaaaatgatgttcagcggtaagtttgtgacaaaggtgctcccagaattcgtccgaaataacaaagaatactcagctgaggagaagcaacaaaagttggacacactgaagctgttcaaggggttcactacctctctggtgccatttttcaacaaccgcgaaaatatctttagcaaaaagcctatccactcctccatctgtcaccggacggtggatgagaacaccgccatcttttatcagaatattatctcctacaagaatattgaggataacgctccacaggaaatagaaaagatcgagcaccaggggaggcaacagctcgacgagtggaagctgccggatatttactcctattcattttataataatgttttgacacaacagggcatagaattctataatgacatttgcgggattgtcaacagccacatgaatctgtattgtcaacagacaaaagagaaatcaggtcagtaccggatgcggaagctctacaagcaaattctctctattagtagtacgagttatgaagtgccttacaagtacgaagacgacgctcaggtgtactcttccatcaacgaatttgttgaccggatttttaattccaatttttccgcaaaagtcgaaaaaatgctggggaaggcggaggaatatgattttgataaaatctacatctcttctaaaaactatagcagcatcagcaacttcatctctggcaaatggaatactctcgacgattgcattcggcgctattacgaggacaacactgttgggaatggagataaaaaggagaaaaaggtggaggagaaagtgaaaaaagatagttttcgcagtttggacagcattgataaggtcgtcgagatgtatgagaaacgagggaagtctgctaaagagtacatttaccagattagggagatttactctgacaataagctctataaatttggacaggatgggtccgatacggtgaaactgatcgaaaacgacgctaagatcgaacgcatcaaatgtgtattggacatgctgctcaacacaaaccgatttctggatacctttgctgtcggcgacggtgaggccgtggacgtaggcttctacagcgagatagatgaactgaaggagatcatcgacgggattgaaccactttacaaccgggtgcgaaattacgtgacgagaaagccctataacaaaaataagattaaactgaactttaactcccctaccttggctgaggggtggtctaagagcaaggaatatgacgataatgccataatcctgagaagagacggcaagtattacctgggcatctttaatgttaaaaacaagcctgacaagaaaataatggagggttacagtggcgatgtgggagacggctatgagaagatggtgtatagcttattaagcaacattcattctaactttcctagaatcttcattaaatctgacgagtgtgaaaagaagtataagttgtcacagtatattatcgatggctacgacaacgaccgccacatcaagagctccaaaaacttcgatataaagttttgtcacgacctgatcgactattttaaggcttcaatcaatgcaaatcctgactggaaagtgtttgacttcaaattctcagatactaaaagctatgaagacatatctggcttttatagtgaagtagaaaagcagggttataagatcagttgggtaaacatttctaaagaggatattgatagattagatgaaaccggccagatatacctcttccagatatacaacaaggacttttcagagagcagcatgggaacacctaacctgcacacgctgtatttcaaaaatctcttcagtgaagaaaatatacgagaaacagttctgaagctttccggcaaaggcgagctgttcttccgcaaggcctctatcgacaaaccatctggacataggaagggatctatactggtcaacaaaacttataaaaccaatatcggaaacgaagaggtacgagtcccaatcccagacaaggagtacatggagatctatacctacttgaacaacggaagaacaacaaagctttccgaaaacgctcagtcactgctggacaacaaactcgtggagtatttcgaagcggagaaagagatcattaaagatcgtagatatacagtggacaaattttttattcacacgagcgttgtgatcaattataatgctgaaggggcttctgcgaagcagctcaacgagcaggtgctcgattacatttcaaagcaagatgatatgcacattatcggaatcgatagaggtgaaaggaacctcgtgtacgtgagtgtcatcgacatgaaggggcgaattgttgagcaaaaaagctataacgtggtaaattcctattcctatcaaaagaagcttgtggagcgcgagaaggcccgggacgaggcgaggaagtcttggaaggaagttggaagaatcaaggatttaaaggatggctacctgagcctggtggtgcacgagatcgctgatatggtgattaaatacaatgctatcatagccatggaggatctcaattatggattcaagagggggcgcttcaagattgagcgtcaagtgtatcagaagtttgagagcatgctgattagtaagctgtcatatctggttgataaaaccaaaaaggtagatgagcccggaggtgtcctgaaagggtaccagctggcgtttgtgccaaaggaggtaaagaaagttgggcgccaatgtggcatcatcttctatgtgccgcccgcttatacgagcaaaatagacccagcaacagggtttgtagacatgtttaagttcaaatccggggaaaaggaaggaacggctagagccgacaatgaccgtaaagagtttttgtcaaagttcgattgcattagatacgtcgagaaaaacgacaacagagaggaaatgttcgctttcaccttcgactacgataacttcgcgatgcacaacacagtgatcgcaaagaagaagtggaccgcatacacttttggatctcgaattcagaaagtttatgagaacggacgctacacctcttcaaccagagaaatacagctgacagacaagatgaaacgcctgcttaatgagaacaacatagaatatggggatggtcacaacttggtcgatgatatcagaacgttagacgtcgattcatctggcgccgtcatcaatgagattttcaaaatattccggctgaccgtgcaacttagaaattcaaaatcagaagcagagaatgagaagaatggggagtacgatcgaatcatcagccccatcatgaatgatgccggcgagttttttgacagctttaagtataagaagatgaatgaagaaactgaacctggtaaacacaatgccactatgccgatcgacgctgacgctaatggcgcctactgtattgctatgaaatgtctctatgaggccaaaaacataaagagcggttgggaaaaggagggaaaaaaaaataacgaccttttatgtgtgacaaacgctgactggtttgactttatgcagaacaagcgttacgtgaaacgtccggcagcgactaagaaggcggggcaagctaagaagaaaaagggtagcggacctgctgccaagagggtcaagttggacggcagcggcctcgagcaccaccaccaccaccactga

SEQ ID NO: 775 - DNA, 3876 bp, synthetic construct
  misc_feature 1..3876: note = Sequence codon optimized for human expression
  source 1..3876: mol_type = other DNA
atgaataacctgaagcagttcatcggcatctacccagtaagcaagactctcagattcgaactcaggcccattggcaaaacacaggagtggatcgaaatcaataaagtacttgaaggtgacgtgcagaaggctgccgattatccgactgtgaaaaagctgatcgacgagtaccacaaaatctgtatccacgactctctgaaaaacgtgcattttgattgggcacctctcaaagaggccattgtcatcttccagaaaacaaagagcgatgagtctaagaagagactcgaggccgagcagacgattatgcgcaaacaaatcgccgccgcgattaaggatttcaagcacttcaaagagctgacagccgcaaccccttcagacctgataacatccgtgctgccagaattttctgacgacgacagtctgatgagctttagaggatttgctacctacttcagtggatttcaggaaaatagaattaacatttactcacaggaatcaataagtactggcgtcccgtaccgtattgtccacgacaattttcccaaattcttgtccaaccaggaggtctacgatcgaatcagatccgtatgtcctgaagtaatcaagcaggcctcagaggagcttcagccttttctggaaggggttatgatcgatgatatcttctccttggatttttataactccctcctgacacaagatggcatcgacttttataatcgggtcattggcggagtctccgaagaggggaagcagaagtacagaggtattaatgagttttcaaacttgtaccgtcagcagcacaaggacctggctgcatccaaaaaggccatgacaatgatccccctgtttaagcagatcctcagtgatagggaaacgttaagctatatccctgtgcaaatcgagtctgaggatgagttagtgtccagcataaaacagttctacgagcatataactcactttgaacgcgatggtaaaaccgtgaatgtcctgtctgaactggtggctgtcctgggaaacatcgacagttacaatcctgacggaatttgcatctccgctagcaagttaacggacatctcccaaaaagtatatggtaaatggtccattatagaggagaagctgaaggagaaggccatcatgcagtatggtgatataagtgtcgcaaagaacaaaaagaaagtggacgcctacctgagtaggaaggcctactgtttgtccgatctgtgcttcgacgaggtggtgtctttcagtcggtattattcagagctgccacaaatgttaaatgccatcaatggctattggatgcagttcaacgaatggtgtcgctccgacgaaaaacagaagttcctgaataatcctatgggcaccgaggtcgtcaaatgccttctcgatgcgatgatggagctgtaccataaatctgccgttttggtgatgccggaggaatatgaagtcgacaaatcattctacaacgagtttattcctctctatgaggagctggatacgctgttcttattgtacaataaggttcgcaattatcttacccggaaaccatctgacgttaagaagtttaaactgaactttgaaagcccaagtctggcctctggatgggaccagaacaaggaaatgaaaaataatgccatcttactgttcaaagacggtaagagttaccttggagttttgaacgcaaagaataaggcaaagatcaaggacgccaagggagatgctagcagcagcagctacaaaaaaatgatctacaagcttctgtccgatcctagcaaagatttaccgcacaaactctttgccaagggtaatctcgatttttataaacctagcgagtatattttggagggacgggagttggggaagtacaagaagggtccaaactttgataagaagtttttgcacgacttcatagatttctacaaagccgctattgccatagaccctgactggagcaaattcaactttcagtacagcccgacggagagttatgaggatattggcgcttttttttctgaaatcaaaaagcaagcttataaaatccgctttactgatataaccgaatcacaggttaacgaatgggtggataatgggcagctttatctgtttcagctctacaataaggactatgctgagggagctcacggacgcaaaaacctgcatacattgtactgggaaaacctcttcaccgacgaaaatttgagcaacctggtgctcaagttgaatgggcaggccgagcttttctgccgtccccagagcatcaagaaaccagtcagtcacaagatcgggagcaagatgctcaatagaagggacaagtccggaatgccgattccagagaacatctatcggagtctgtaccagttctataacggcaagaaaaaagagagtgagttgacaaccgctgagaaacagtatatggatcaggtaattgtgaaagatgtaacgcatgaaataataaaggaccgccggtacacccgtcaggagtatttttttcatgtgcccctgactttgaacgccaacgctgatgggaatgagtacatcaatgagcaggtgctcaactatttgaaatataacccagatgtgaacatcatcggcattgaccgaggtgagcgtcatttgatttacctgactctcattaaccaaaggggcgagattatcaaacaaaaaactttcaacattgtcaataattataactaccaggtgaagctggagcagcgggagaaggagagggacgaggcacgtaagagctgggattctgtgggcaagatcaaagacctgaaggagggctttttaagcgcggtgatccacgaaatcaccaagatgatgatcgaaaacaacgccatcgtggtattagaagatctcaattttggtttcaagcggggcagatttaaagtagaaagacaggtgtaccagaaattcgagaagatgttaatcgataagcttaattacctctcatttaaggaccgtgaggttggcgaagaaggcggaatcttacgcggttaccagatggcacagaagtttgtcagttttcaaaggctcgggaagcaaagcggcttcttattctacattccagctgcctatacaagtaagatcgaccccgttaccggattcgtgaatcacttcaattttaatgacataaccaacgctgaaaagaggaaggatttcttgatgaagatggagcggatcgaaatgaagaatggatacattgagtttacgttcgactatagaaaattcaagacctatcagaccgattaccagaatgtgtggactgtatccacattcggcaaacgtatagttatgcggattgatgaaaagggctacaaaaaaatggtggattatgagcccactaacgacattatctacgccttcaagaataaagggattttgctgtccgagggttccgacctgaaggcactgatagccgatgtcgaggctaacgctactaacgctggattcttcggaactctgctgtacgctttccagaaaaccctgcagatgcggaattccaatgctctgaccgaggaggacttcatcctgtcccccgtagcaaaagatgggcatcatttctgttctaccgatgaggccaataaagggcgagatgctcagggtaactgggtaagtaggctgcccgttgacgcggacgcaaatggagcatatcatatagccctgaaaggtctctatttgctcagaaatcccgaaaccaaaaagatagaaaatgagaagtggtttcagtttatggtggagaagccatatctggaaaaacgtccggcagcgactaagaaggcggggcaagctaagaagaaaaagggtagcggacctgctgccaagagggtcaagttggacggcagcggcctcgagcaccaccaccaccaccactga

SEQ ID NO: 776 - DNA, 3897 bp, synthetic construct
  misc_feature 1..3897: note = Sequence codon optimized for human expression
  source 1..3897: mol_type = other DNA
atggaatccaacaataaaatcttcactgagacaattggcacctccagcattgccaagaccatgcggaattctctggtccccactgagagtactaaacgtaatatcgaaaagaatggtataattatcgacgatcaacttcgagccgagaagcgtcagcagctcaaggaaatcatggatgagtactatagaacctacatcgacaataagctgtctaatgtggctctcacacggacaattgattggaaagagctgttccaagctatcgaggataattacaagcagaatactaccaagaccaaaaacgagctcgaaaagaagcagaaagagaaacggaccgagatatataagatactcagcgacgacgagaaatttaagcagctctttaatgctaagctgctgacgaacgtgctgccagagttcattaaaaaccagaatattgataatgaggaaaaacaggaaaagatcagcacggtcgaattgtttcagaggtttaccagcagttttacagacttcttcaagaacagaaaaaatgtgttcagtaaagacgaaatttccacatctatttgctatcgagttgtgcaagaaaatgcttggatcttctatcagaacctcttggccttcgaagaaatcaagaaaactgcggagcaggagatcgagaagatcgaagcagaaaatagggattcaatcagcgattattctttgaaggaaatctttgacttcgacttttatgggctcctgcttaatcagggtggaattcgcttctataatgacgtgtgcggcaagattaattaccacatgaacttatatggccagaagcacaatatcaaatctaacaaatttaagatgaaacgcatgcacaagcagatcctctctatagacgagtcaactttcgaagtcccaacaatgttcgagaatgataaggaggtttaccaggttctgaatgaatttctgagcgatctcgcctccaaaaaaatactggaacgggttgagaaaataggagagaatgtcagcgagtacgagataaacaaaatctacattcagagcaaaaattttgaaaagttctccagttttatgtgtggcaattggcagataatcaacgattcactgaagacctactataacgaaaaaatcaaatctaagggcaaagctaaagaggagaaggttaaaaaggccatcaaggcaatcgagtacaagtccttggccgacatcaaccaactggttgagaggtataacaatgacgagcttaatcgcaaggccgaagagtacatctcagcaattaatgaaaagatcaaagatttagacgttaatgagattgaatacgatgagaagataaatttgattgagaatgagacaaagagtgaagaaattaagtccaagttggacagcattatggagattatgcactggactaaaatgttcattatcgaagaagagatcgaaaaggatgttaatttctataacgaaatcgaagaaatttacgacgaactgcagcctcttgtaactatctataacagaattaggaactatgtcacccagaagccttactctgaggagaaaataaagctcaatttcggcattcccactcttgcaaacggctggagcaaaacgaaggagtacgacaataatgccatcatcatgataagggatggcaagtactacttgggcatatttaacgctaagaacaagcctgacaagaaaataatggaagggcaccagagcgaagaaaatggggattataagaaaatgatctatcggttgttaccggggcctaacaagatgctgcccaaggtgtttatgtctaagaccggaatagcagagtataagcctagccagtacattcttgagtgctatgagcagaataagcatataaagagtgataaaaacttcgatatcaagttttgtcgggaccttatcgattttttcaagacaagtattaatcgccaccctgagtggagcaagttcaactttaaatttagcgagaccagcgaatacgaagacatttcaaccttctacagggaagtggagaagcagggatataaaattgagtggacctacatcagcgagaaggagatcaaagagctggacgagaatgggcaactctatctgtttcagatctacaataaggacttttcagagaaatcaaaaggtaaagagaacctgcacaccatgtatttgaaaaacttgttttctgaggagaatctgaaaaacatagtacttaaactgaacggggaagccgaggttttcttccgcaaaagtagtattaagaagcccatcatacacaagaagggttctgtactcgtgaataagacgtacaacgagaacggggaacggaaaagtatccctgaggaacagtacacggaaatctacaaatatctgaactccatcggcacaaacgagctctcagaaaaatccaagaaacttatggaagaggggaaagtggagtattacaaggccaattacgacattgtaaaggattataggtatagtgtagacaaattcttcatccacttgccaatgaccatcaacttcaaggcggcaggcttctctcccatcaacaacattgccttaaaaaatattgctctgaaggatgacatgcacattataggcattgatcgcggcgagagaaatctgatatatgtgtccgtgatcgacacaaaggggaatattgttgaacagaggaactttaacattgtaaacggaatagactacaaagagaagcttaaacagaaagaactggacagggacaacgcaagaaagaactggaaagagatcggaaagattaaggacctgaaggaaggatacctctccctggtggtgcacgaaatagctaaactggtggtgaagtataacgccattatcactatggaggatctgaatcagggattcaagcgaggccggttcaaagtcgagagacaggtctaccagaaattcgaaaccatgttaataaataagttaaactatttagtggacaaggacctcgccgtggaccaggagggtggcttactgagaggctaccaactcacctacattcccgagagcctgaaagtgctcggacgtcagtgtggatacatcttttacgtccctgccgcctatacctccaaaatcgaccctactaccgggtttgtggccattttcaactataaaggcatgaccgacaaggattttgtgacttcctttgatagcatcaagtatgacgacgaaaggggactcttcgcatttgaattcgattacgaaaattttgtcacacacaaagtggagatggctcgcaataagtggacagtctatacctacggtgaacggatcaaacgcaagtttaaaaatgggtcctgggataccgcagagaaggtggacctgacgtaccaaatgaggagcatattagaaaagtatgagattgagtacaataagggtcaggacatactggagcaaattgaggaactggacgagaaggcacagaacggcatctgtaaagagatcaagtacctcgtgaaagatattgttcagatgagaaattctctgcccgataacgccgccgaagattacgacgcaatcatttccccggttataaacaacaacggcgagtttttcgactctacgcgcggggatgaagacaagccactggatgctgatgccaacggtgcctactgtatcgccctcaagggcctttatgaggtgatgcaaatcaaaaaaaactggaatgaagagacggagttccctaggaaggagctgaagatacggcatcaggactggtttgatttcatccagaacaagaggtatttaaaacgtccggcagcgactaagaaggcggggcaagctaagaagaaaaagggtagcggacctgctgccaagagggtcaagttggacggcagcggcctcgagcaccaccaccaccaccactga

SEQ ID NO: 777 - DNA, 3897 bp, synthetic construct
  misc_feature 1..3897: note = Sequence codon optimized for human expression
  source 1..3897: mol_type = other DNA
atgaattataaaactgggttagaggattttataggtaaggagtctctctccaaaactttgagaaatgccctgatccctaccgaatctacaaagatacacatggaagagatgggtgtgatacgagacgatgaactccgtgccgagaaacagcaggaactgaaagagatcatggacgactactaccggacatttattgaggaaaagctggggcagattcagggaattcaatggaacagcctgttccagaagatggaagagactatggaagatatcagcgtgcgcaaagacctggataaaatacagaacgaaaaacggaaagaaatttgttgttacttcactagcgataagcgctttaaagacctcttcaacgcgaaactgatcactgatattttgcccaattttatcaaggataacaaggagtataccgaagaagaaaaggccgaaaaggaacagaccagggtactttttcagcgttttgccactgcctttactaactacttcaatcagcgaagaaacaactttagcgaggacaacatctcaacagccatcagtttccgtatcgtcaatgaaaactccgagatacacctccagaatatgcgggcctttcaacgaattgaacagcagtacccagaagaagtttgtggtatggaagaggaatataaagacatgctgcaggaatggcagatgaagcatatatattccgtcgacttttacgatcgcgaactgacccagccgggaatcgaatactacaatggaatctgcggcaagataaacgaacatatgaatcaattctgtcagaagaacaggataaataaaaacgacttcagaatgaaaaagctgcacaaacaaattttatgcaagaaatccagttattatgagatcccgtttaggtttgaaagcgatcaagaagtttacgacgcattaaacgagttcatcaagacgatgaagaagaaagagataattcgcaggtgcgtacaccttggccaggaatgtgacgactatgaccttggcaaaatttatataagcagtaacaagtatgaacagatctctaatgcactttatggaagctgggacactatccgcaaatgtatcaaggaggagtacatggatgctttgcctggaaagggtgaaaaaaaggaggaaaaggccgaagctgctgctaaaaaagaagagtatagaagcatagccgacatagacaagattatcagcttgtatggatccgaaatggaccgcacaatctcagccaagaagtgcattacagagatatgcgacatggcaggtcagatcagtattgaccctcttgtgtgcaactctgatatcaagttgctccagaacaaggaaaagactactgaaattaaaactatcctggatagctttctgcatgtgtaccagtggggccaaacattcattgtctccgatatcatcgaaaaggacagttacttctacagcgagctggaggacgtgttggaagacttcgagggcattaccacactctataatcacgtcagatcttacgtaacccagaaaccttattccacagtgaaattcaaactgcacttcggttcacctaccctggccaacggctggagccagagtaaagaatacgataacaatgccattttgctgatgcgtgaccagaagttttacctcggaatctttaacgttaggaataaacctgataagcaaatcattaaaggacatgaaaaggaggaaaagggcgactacaaaaaaatgatttacaatctgctccccggaccctctaagatgctcccgaaggtcttcatcacatctagatctgggcaggagacatacaaaccaagcaagcacatactcgacggatacaatgaaaaacgacatataaagtcttcacctaagttcgacctgggatattgctgggacctcatcgactattacaaagagtgtatccacaaacatccggattggaaaaattacgactttcatttttctgatacgaaggactatgaggacatctctggattttatcgcgaagtcgagatgcaaggatatcagatcaaatggacttacattagtgctgatgagatccaaaagctcgatgaaaaaggacaaatattcctctttcaaatctacaataaggattttagcgtgcacagcactggaaaagacaaccttcataccatgtacctgaagaacttgttctctgaagaaaacttgaaggatatcgtgttgaagttgaacggggaggcggaactttttttccgcaaagcttccataaagactccaatagtccataagaaaggctcagtattagtgaatagatcttatacgcagactgtggggaataaagagatacgcgtcagcatccctgaggagtactacacggagatctataattatctgaatcatattggcaaaggcaaattgtcaagcgaagcccagcgttacttagatgagggaaagatcaaatcctttaccgctactaaggacatcgtaaagaactaccgttactgttgtgaccactattttcttcacttaccaataaccattaacttcaaggcgaagtctgatgttgccgtgaacgagcggacccttgcttacattgctaagaaagaggacattcatatcattggtatcgatcgaggcgaacgcaatttactttatatttcagtcgtggatgtgcatggaaacatcagggagcagaggagctttaacattgtgaacggctacgattaccagcagaagctgaaggatcgagagaagtcacgagacgctgccagaaagaattgggaggagattgagaagattaaggagttgaaagaaggctacctgagcatggtgattcactatatcgctcagttggttgtgaagtacaacgcagtcgtggctatggaagacctgaattacgggttcaagaccggccggtttaaggtcgaacggcaagtttaccagaaattcgagacaatgttgatcgagaagctgcattatctggtgtttaaagacagggaggtttgtgaagaaggcggcgtcctgagaggctatcagctcacatacattcctgaaagtctgaagaaagtggggaagcagtgtgggttcattttctacgtaccagccggatatacatccaagattgaccctacaaccggttttgtaaatctgtttagcttcaaaaacctgacgaacagggagtctcggcaggactttgtaggcaagtttgacgaaatccgatacgacagagacaagaaaatgtttgagttctctttcgattataacaattacattaaaaaagggacgatcctcgcctccacgaaatggaaggtatatactaatggaacacgccttaagagaatcgtggtcaatggtaagtatacaagccagtctatggaggtggaactgactgatgcgatggagaagatgttacagagagccggaatagagtatcacgatggaaaggatctcaagggccaaatcgtagaaaagggcatcgaggccgagatcatcgacatttttagactgacggtccagatgagaaacagtcgctccgagtcagaggatagggaatacgatcgcctgatctcacccgtcttgaatgacaagggcgaatttttcgacaccgctacagctgacaagacccttcctcaggatgccgacgctaatggtgcttattgcatcgccttaaagggactgtacgaggtgaaacagatcaaggagaactggaaggaaaatgaacaatttcctagaaacaaactggttcaggacaacaaaacctggtttgatttcatgcaaaaaaaaagatatctgaaacgtccggcagcgactaagaaggcggggcaagctaagaagaaaaagggtagcggacctgctgccaagagggtcaagttggacggcagcggcctcgagcaccaccaccaccaccactga

SEQ ID NO: 778 - DNA, 4035 bp, synthetic construct
  misc_feature 1..4035: note = Sequence codon optimized for human expression
  source 1..4035: mol_type = other DNA
atgaataaagctgctgataattacacaggaggaaactatgatgagtttatcgccctttctaaagtgcagaaaaccctgcgcaacgagctgaaaccaacaccattcacggcagagcacatcaagcaacgagggattatcagcgaagatgaatatcgcgctcagcagtcactcgagttgaaaaaaatcgctgatgaatactataggaactacatcacccacaagcttaatgacattaataacctcgatttctacaatctctttgacgctattgaagagaagtataagaagaatgacaaggacaatcgcgataaactggacttggtagaaaaatccaagagaggtgaaattgccaaaatgctgagtgcggatgataatttcaaatccatgtttgaagcgaaactgattactaaattgctgcccgactacgtggaaaggaattataccggcgaagataaagaaaaggccctcgaaacactggcactgttcaaggggttcacaacgtacttcaagggctactttaaaacacgaaaaaatatgttctcaggcgagggaggggcttcttctatctgccaccgcatcgtgaatgtcaatgcttctattttctatgacaatctcaagaccttcatgcgaattcaggagaaggctggcgacgaaatcgccttgatcgaggaggaactgactgaaaagcttgacggctggcggctcgaacatatcttctcccgtgactactacaacgaggttctcgctcagaagggcatagattattacaatcagatttgcggagatattaataagcacatgaacctctattgtcagcaaaacaaattcaaggccaatatattcaagatgatgaaacttcagaagcagattatgggcattagcgagaaggtgtttgagattcccccaatgtaccagaatgacgaagaagtgtacgctagcttcaacgaatttatcagcaggctggaagaagtgaaattaacagaccgattgcgtaacatcctgcagaatatcaatatttataatactgccaagatttatattaatgcgaggtattacaccaacgtgtcaacctatgtatacggcggctggggcgtcatcgagtctgcaatcgaaaggtacctctgcaacacaattgcgggaaagggccaatccaaggtgaagaaaattgaaaatgccaagaaagacaataagtttatgtccgtgaaagaactcgactccattgtagctgagtatgaacctgattacttcaatgccccttatatcgacgacgacgacaatgcagttaaagtgttcggtggccagggcgttttaggctactttaataagatgagtgagctgctcgctgatgtgtccttgtatacaatcgactataatagcgatgattcactcatcgaaaacaaggaatccgccctgagaataaaaaaacagttggacgatatcatgtccctgtaccattggctgcaaacgttcatcattgatgaggtggtagagaaggacaacgcgttctacgcagagctggaggacatctgctgtgaattagaaaatgttgtaacgttatatgaccggatcagaaattacgtcacacgaaaaccctattcaactcaaaaattcaagttaaatttcgccagtccaaccctggcaagcggatggtcccgatctaaagaatttgacaataatgctattatcttgctgagaaataacaaatattacatcgcaatttttaacgtgaataataagccggacaaacaaataattaaaggcagcgaggaacagagactgtctaccgattataaaaagatggtctacaatctgctgccaggccctaataaaatgctgcctaaggtgtttatcaaatccgataccggcaagcgcgattataacccaagctcctatattctggaggggtacgagaaaaatcggcatattaaatcaagcggcaacttcgatattaactactgtcacgacctgatagattattacaaggcatgcatcaataagcatccagagtggaaaaattacggattcaagttcaaggagactaaccagtacaatgatatcggtcagttctataaagatgttgagaagcagggatattccatctcatgggcatatatctcagaggaagatatcaacaaacttgatgaggaggggaagatatacctgttcgaaatttacaataaagatttgagtgcacactccaccgggagagacaatttacatacgatgtatttgaagaacatcttctccgaggacaatctcaagaatatttgcatcgagctgaatggagaggcagaacttttctatagaaagtccagtatgaagagcaacatcacacacaagaaagatactatcctggtaaataagacctacatcaacgaaacgggcgtacgcgtgtcactgtcagacgaggactatatgaaagtgtataattactacaataataattatgtaatcgacacagaaaatgacaagaatttaattgacataatcgagaagatcggtcacaggaagtccaagatagatatcgtaaaggacaagaggtataccgaggataagtatttcctctatctgccaataaccatcaattatggtatcgaggatgaaaatgtgaatagtaagatcattgaatatattgccaagcaagacaatatgaatgtgatcggaatcgaccgaggtgagcgaaatctcatttatatctcagttatcgataacaaaggcaacatcatcgagcagaagagcttcaacttggtgaacaactatgattataaaaacaaacttaaaaacatggagaaaacccgggataacgcaagaaagaactggcaagagattggcaagattaaagatgtgaaatccggatatctctcaggagtgatctccaagatcgcccgaatggtgattgactataatgccatcattgtcatggaggacctgaacaagggctttaaaaggggcagatttaaggtcgaacgacaagtgtaccagaagttcgagaacatgctgatctcaaaactgaattacctggttttcaaggaaagaaaggctgacgagaacggggggatacttcgtggatatcagctgacatatatccccaaatctattaagaacgtcggcaaacagtgcgggtgcatcttctacgtacccgccgcctataccagtaaaatagacccagccaccggctttatcaacattttcgacttcaaaaaatattccggttccgggatcaatgcaaaggtcaaagataagaaggagttcctgatgtcaatgaacagtatcaggtatatcaacgaaggaagcgaagagtatgaaaaaattgggcatagggagctgtttgcttttagcttcgactacaacaatttcaagacgtataatgtttcttctcccgtgaacgagtggacggcttacacttacggtgagagaatcaaaaagctgtataaggacgggcgctggctgaggagcgaagtcctgaatctcactgagaatctgatcaaactgatggaacagtataatatcgagtacaaagacgggcacgatatccgtgaagacataagccacatggacgaaacccgtaatgcagacttcatatgcagccttttcgaagagttgaaatataccgtgcagttgcgtaactctaaatccgaagctgaagatgagaattacgacagactggtgtccccaatcttgaactcatccaatggattctatgattcctctgattatatggaaaatgagaataacactacacataccatgcccaaagatgctgatgcaaatggagcctactgcatagcccttaaaggcctgtacgagataaataaaatcaaacagaactggtccgatgacaagaagttcaaggagaatgagctgtacattaatgtaaccgagtggctggattatattcagaatcgcagattcgaaaaacgtccggcagcgactaagaaggcggggcaagctaagaagaaaaagggtagcggacctgctgccaagagggtcaagttggacggcagcggcctcgagcaccaccaccaccaccactga

SEQ ID NO: 779 - DNA, 3906 bp, synthetic construct
  misc_feature 1..3906: note = Sequence codon optimized for human expression
  source 1..3906: mol_type = other DNA
atggctaaaaacacaatctttacacaattcactggactgtatcccgtttcaaaaacactgcgattcgaattaaagccaatgggaaaaaccttggaaaagatcaaagaaactggcgttattgagaatgacaagaaacgccacaacgattactttgacgccaagaagattattgataagtaccacaagtactttatcgacgccgccctttcaaagtttagccggatagattggaacccgctgaaggaggccattgagggttccttggataggagcgacgcgagtaaaaagaagctcgaaaagacgcagacggagtttaggaagaagatagcgaaggcccttactacccatgatcactacaaagagcttactgcctctacccctaaggacttattcctgaaggtgttccctgaccacttcggcaaacagccagcaatagatacttttgatggcttcagtagctactttacaggttttcaggagaatcgccagaatatctactccgatgaagctatcagcactgccatcccgtaccggttggtgcacgacaatttccccaagttcctctctaatattgaggtctacaagactctgaaggataatgctccaagcgtcttgtccgatgcagagaatgaactgaaagacttcctcaatggcaaacccctcgccaacatctttgagctgaatgcctacaatgacgtgttgactcagagtggcatcgacttcttcaatcaggtgattggcgggatttcaggcgaggggggcgagaaaaaaactcgcggaattaacgagttcagtaacctctatcgccaacagcacccggaattcgcccaaaagcggctcgccacaaaaatgattccactctataagcagattctgtctgacagagagaccaaatctttcattctggaatcttatagcaccgatagccaggtgcaagagtctgtcaaagagttctttgagtcccagatcctcaattgtgatatcgctggccgtaaggttaatgtgcttaatgaactgacttctctgattaagagaatcgctgaatttgacctgggaagcatttatattaatcaagaggagctcagtaacatctctctcgagctcttcaagtcatggaatacaatcaacgctgtgttgttcaaaaatgctgaaaatcgcatcggatccgctgaaaaggcagctaataagaagaaaattgatgcatggatgaagtccaatgagttcagcatcgctactctgaatctcgctatcgcggagtctgactctgaggagatttccagagtgaagatagaatcctactggaatgatttcgaggcaaaggtacagagtattctttgtggagacaatcggaggaatctcgacgagttcttgtccgcaacctttaacgagaacaacgcgctgcgcgaggactcagaaatcattggcaagctcaaggcattccttgacgccctgatcgaaatcatgcactccattaaacctttgataagcgacgcggagaacagagatctgtctttctataatgaactgatgcccctttacgatcaactttcactggtggtccctttgtataataaaattcgcaattatgcgacacagaaactcacagaatcagagaaatttaagctgaacttcgacaacccaaccctggccgacggatgggatcagaataaagaagatgccaacactgctatcctgctgctcaaaaacggactgtactatcttggcattatgaacgccaagaacaaacccaaaatcaaagatttcaaaacatctgaatctgaagactgctatgataagatggtgtacaagctgctgcctggtcctaacaagatgctcccgaaagtgtttttctccgagaagggtttagctacttttaagccacctaaagacattctggatggttacaatgctggaaaacataaaaaaggagatctctttgacattggattctgtcaccagcttatcgactttttcaaagaatccatcgcgaagcacccagactggaaaaaattcgacttcaaattctccgacacatcctcctatgaagatattagtgggttctacaaggaggttacagatcaaggctacaagatcaccttcagcaaaatccccaccagtcagattgatgaatgggtgaacgagggaaaactcttcttatttcagatttacaacaaagatttcgcaccaggggcaaaggggtccccgaatctgcacaccttgtactggaagtccgtgttttcacctgagaacttgaaagacgtggttgtgaaactgaatggagaggctgaactcttttataggcccagctctgtaaagaaaccttatagtcacaaggtgggcgaaaagctggtgaacaggattggtaaagacgggctgccactgcccgaatctgttttcggggaattattccggtatttcaatgggaaattagatggcgaattaagcgacgaggccaagcgctatctggatgtggccgtggttaaggacgtgaagcatgagatcgtgaaagataggaggtatacacaggacaagtttgagttccatgtgccactcacgctcaacttcaaagctgacagcaagaacgagtatatgaatgagcgggtccggcacttcctcaaggataatcctgacgttaatatcatagggatcgatagaggagagaggcacctcctgtatatgacgctgattaaccaaaaaggtgagatactcaagcaaaagagctttaacattgtggagtctgtgaattaccaggccaagctggttcagagggaaaaagagcgggatgcagcacgtaaaagctggagctctgtcggaaaaattaaggatctgaaagaggggtttcttagtcaggttatccatgagataacaaccaccatgattgaaaacaacgcaattgtggtgctcgaagatctgaattttggcttcaaacgaggccggttctgtgtagagcggcaggtgtatcagaagttcgaaaagatgctgatcgacaaactgaattacctggtgttcaagaataaacctgagggggacgtgggtggtgtcctcaaggggtaccagctggccgagaagttcgattcattccagaaactggggaagcagagtgggttcttattttacataccagctgcgtacacctccaaaattgatccaacgaccggtttcgctaatttgttcaacatgacagaattgacctctgctgaaaaaaaaaaagatttcttgagccacttcgatgacataacctacgacgggaagaacgacaggttcctgtttgggttcgactataagaactttaaatgttttcagactgatttcattaagaaatggacagtttacacccaaggaaaaagaatcgtttatgataaggaaagcaaatcagcaaaagagatttttcctgtcgaaattataaaagctgctctggcaaaacagaatatcgccctcactgaccagctcgatgtgctgtccgctattaattccgttgaagcctctcccaagtccgcctcttttttcgggaatatatgctatgcttttgagaaaacgcttcagatgcgcaactcaattccaaacaccgacgaggattaccttgtgtccccagttatgaataaaagaggtgagttttatgacagcagaagttgtgatgacgctctgccccagaacgctgatgccaacggtgcctatcacatcgcattaaaaggcttataccttatcaaaaacgtattcgatgctggtgggaaagatctgaagatatcccacgaggactggtttaaattcgctcagagccgcaattgcaaacgtccggcagcgactaagaaggcggggcaagctaagaagaaaaagggtagcggacctgctgccaagagggtcaagttggacggcagcggcctcgagcaccaccaccaccaccactga

SEQ ID NO: 780 - DNA, 3933 bp, synthetic construct
  misc_feature 1..3933: note = Sequence codon optimized for human expression
  source 1..3933: mol_type = other DNA
atgaaaaaccttgccaactttactaatctgtactccctgcagaaaaccctgcgcttcgagctgaagcccatcggcaagacactggattggattattaaaaaagacctcctgaagcaggacgagattttggccgaggattacaaaattgtcaaaaagattatcgatcgataccataaagatttcatcgatctggcattcgaaagtgcctatctccagaaaaagtccagcgactcttttactgccattatggaggcctcaatacagagttattcagagctctactttattaaggagaagtctgaccgggataagaaagccatggaggagatatctggtattatgagaaaggagatcgttgaatgcttcacggggaaatattccgaagtggttaaaaagaagtttggcaacctctttaagaaagaactcattaaagaggacctgctcaatttctgcgagcccgacgagctgccgataatccagaagttcgccgatttcacaacgtattttaccggctttcacgagaatagagaaaatatgtacagcaacgaagaaaaggcgactgcaatagcaaacaggctgatacgagagaaccttcctaggtacctcgataacttacggattattagatccatacagggccgttacaaagatttcggatggaaggatctggaatccaacttaaagcgcattgacaagaacttacagtactcagactttttgacggagaacggcttcgtatatacgtttagccagaaaggcatcgatcggtacaacctcatcctgggcggacagtccgttgagagcggagagaaaatccagggactgaacgaattaatcaacctgtacagacaaaaaaatcagctggaccgtcggcaacttcctaacctgaaagagctctacaagcagattctttccgatcgcacccgccactcttttgtaccagaaaagttcagctccgataaagccctgcttagatctttactggacttccataaagaagtgatccaaaacaagaacttattcgaggaaaagcaggtatcacttctccaggcaatccgggaaacattaaccgacctgaaatcctttgatcttgacaggatctacctcaccaacgatactagcttaacacagatctctaattttgtgttcggggattggagcaaggtcaagacgatcctggccatatattttgacgaaaacatagcgaacccgaaggacagacagcggcagtcaaactcctacctgaaggccaaagaaaactggttgaaaaagaattactactcaatccatgaacttaacgaggccataagtgtgtatggtaagcacagcgatgaggagctgcctaacacaaagatagaggactattttagtggcctgcaaaccaaagatgaaactaagaaaccaatcgacgtgctcgatgcaatcgtttccaaatatgctgacctggagagcctccttactaaggagtatcctgaggataagaatttgaaatccgacaaggggagtatcgaaaaaatcaaaaactaccttgacagtattaagctcctccagaactttctcaagccccttaagccgaaaaaggtccaggacgaaaaagatctgggattctataacgatcttgagctgtacttagaatcactcgaatctgcaaacagtctttataataaagtacgaaactatctgacaggaaaagaatatagtgacgagaagattaagctcaacttcaagaattctactctcctggacggctgggacgagaacaaggaaacttcaaacctgtctgttatttttagagatacgaataattactacttaggaatcctcgacaagcaaaacaatcgaatatttgaatccatccctgagatccagtccggagaagagacaatccagaagatggtgtacaagctgttacccggtgcaaataatatgctccccaaagtgttcttcagtgagaaaggtctcctcaagttcaacccctccgatgaaatcacgagtctctacagtgaaggacgatttaagaagggagataaattcagtatcaattctctgcatacacttatagatttttataagaagtccttggcagtgcacgaagactggagcgtgttcaacttcaagttcgacgagacctcccattacgaagacatcagtcagttctacagacaggtggagtcacaagggtataagatcacatttaaaccaattagcaaaaaatacattgacacgcttgtcgaagacgggaagctttacctgttccagatttacaacaaggacttctctcaaaacaagaaaggcggaggcaaacccaacctccatacaatctactttaagtccctgttcgagaaggagaacctgaaggatgtcattgttaagcttaacgggcaggcagaggttttttttaggaaaaaaagtattcactacgacgagaacatcacacgctatggacaccactctgaactgttgaaggggagattcagttatcctatcctcaaagacaagcgatttacagaggacaagttccagttccacttcccaatcacactcaacttcaaaagtggggaaattaagcagttcaacgcccgcgtgaatagctatcttaagcataataaagacgtgaaaatcatcggtattgatcggggggaacggcatttactgtacctctccctcattgaccaggacgggaagatccttcgacaggagagtctgaacctgatcaaaaacgaccagaatttcaaggcaataaactaccaggaaaagttacataagaaggaaatagaacgtgatcaggcaaggaaaagttgggggtctatcgagaacattaaagaattgaaggaagggtatctgtcccaggtggtgcataccatctctaagctgatggtggagcataacgccatcgtggtcctggaggatctgaatttcgggtttaagaggggacggcaaaaagtcgagcgacaggtgtatcagaagttcgaaaaaatgcttatcgagaaactgaatttcttggttttcaaggataaagagatggatgagcccggtggcattctcaaagcataccagcttaccgataacttcgtctcttttgaaaagatggggaaacagacagggttcgttttttacgtccccgcttggaacaccagcaagattgacccaaagactggatttgtgaactttctgcatttgaattatgaaaacgttaatcaggctaaagagctcatcgggaagtttgatcagattcgatataaccaggatagagattggttcgaattccaggtcacgactgaccagtttttcaccaaagaaaatgccccagacacccgcacttggatcatttgctccacccctacgaaacgcttctacagcaaaagaacagtcaatggatccgtgtctaccattgaaattgacgttaaccagaaactcaaagagcttttcaacgactgcaattaccaagacggagaggatcttgtggaccgtattctcgaaaaggactcaaaagatttcttctccaagttaatcgcctatcttcgcatactgactagtttgagacaaaacaacggagagcagggattcgaagagagagactttatcttatctcctgtcgtgggcagcgatggaaaatttttcaacagtttggatgcctccagccaggagcccaaggatgctgacgctaacggagcctatcacatcgccctgaaaggactgatgaatctgcatgtgatcaacgagacagatgatgagtccctggggaaacccagctggaagatcagtaacaaggattggctcaatttcgtttggcaacggccctcccttaaagcgaaacgtccggcagcgactaagaaggcggggcaagctaagaagaaaaagggtagcggacctgctgccaagagggtcaagttggacggcagcggcctcgagcaccaccaccaccaccactga

SEQ ID NO: 781 - DNA, 3855 bp, synthetic construct
  misc_feature 1..3855: note = Sequence codon optimized for human expression
  source 1..3855: mol_type = other DNA
atggaaaccttcagtggctttacaaatttgtatcccctgagcaagactctgcgcttccgactgattcctgtaggagaaacactgaagcactttattggaagtgggatcttggaggaagaccaacatagggctgaatcctatgtgaaggtcaaagctattattgacgactatcataggacttatattgaaaacagcttgtctgggtttgaactccctctcgaatccaccggaaagtttaatagtctcgaagagtactacctgtatcataacattcgcaataagacggaggagattcagaacctctcctccaaggtgagaaccaatttgaggaagcaggtagtgacacagctgacaaagaacgagatatttaagcggattgacaaaaaagagcttatccaatcagacctgattgattttgtcaagaacgaacccgacgctaacgaaaagattgccctcatttcagaattccggaacttcacagtatattttaaggggttccatgagaaccggcgaaacatgtattccgatgaggaaaaatccaccagcatcgcctttaggttaatccacgaaaaccttcctaagttcattgacaacatggaggtctttgccaagatacagaacaccagcatttcagaaaactttgacgctattcagaaggaactgtgtcccgaattggttactctgtgtgaaatgttcaagctgggctacttcaacaagaccttatcccagaagcagattgacgcgtataacactgtgattggcgggaaaaccacttccgagggcaagaaaattaagggcctgaatgaatacatcaatctgtataatcagcagcataagcaggaaaagctccctaaaatgaagctgctcttcaagcagatcctgtctgatcgcgagtctgcctcctggctgttggagaaattcgaaaatgacagccaggtcgtcggagccatggtcaatttttggaacactatccacgatacagtgctggcagaaggcggcttgaaaactatcattgccagcctgggctcctacggactggaaggcattttcctcaaaaatgacctgcagctgaccgatatctctcagaaggccacaggctcatggtccaagatatctagcgaaataaagcaaaaaatcgaagcaatgaatccgcagaaaaagaaggagagctatgagagttatcaggagcgcatcgacaagctgttcaagtcatacaagagcttcagcctggctttcgtgaacgagtgcctgcgcggcgagtataagatcgaggactactttctgaagctgggcgctgtcaatagttccctgctgcaaaaggaaaatcattttagccacattctgaacacctatacggatgtgaaggaggtcatcggcttctacagcgaaagcactgacactaagctcattcaggacaacgactccatccagaaaattaagcagtttctcgacgcagttaaggatctgcaggcttatgtgaaacccctgctgggcaactcagacgaaaccggaaaagacgagaggttttatggagaccttattgagtattggtctttgttggatcttatcacacccctgtacaatatggtaaggaattacgtcacacaaaagccatattctgtggacaagattaagatcaattttcagaatcctacactgctgaacggttgggatctcaataaggaaatggacaacactagcgtgatattgcggagagacggcaagtactatttagccatcatgaacaacaaatcacgcaaagtcttcctgaaatatccgagtggcaccgaccgcaattgctatgagaaaatggaatataagttgttgcctggggcaaacaagatgctccccaaggtgtttttcagcaagtcaagaatcaatgaattcatgcctaatgagcgattgttatcaaactatgagaagggcacccacaagaaatccggcacttgctttagcctggacgattgccacaccctgatcgacttcttcaagaaaagtctgaacaagcacgaggattggaagaatttcggctttaagttttccgatacttctacttatgaggacatgtcaggtttttacaaggaggtggaaaatcaggggtataaactttccttcaagccaattgacgccacctatgtggaccaactggtggacgaaggaaaaatctttctgtttcagatctacaataaagatttctctgagcactctaaaggcaccccgaatatgcatacactctattggaaaatgttatttgacgagactaatctgggggatgttgtttataagctcaatggcgaagccgaagtgttctttaggaaggccagtataaacgtctctcaccccactcacccagctaatatccctattaagaaaaaaaatctgaaacataaggacgaggagcggattctcaagtacgatctgattaaggacaaaagatatacagtggatcagtttcagttccacgtgccgatcaccatgaattttaaagcaaatggcaacggaaatatcaaccaaaaggccattgactatcttagaagtgcctccgacactcatattatcggtatagatcggggggagcggaacctgctgtaccttgtcgtgattgatggaaatggaaaaatctgcgaacaattttccctgaacgagattgaagtggagtacaacggggaaaaatacagtaccaattatcacgatcttttaaacgtgaaggaaaatgaacgcaaacaggcccgccaatcttggcagagtattgcgaacattaaagatctgaaggaagggtacctgagccaagttatccacaagatatctgagttgatggtgaagtacaacgcaattgtagtcttggaggatttgaacgctgggtttatgagaggtcggcagaaagtagaaaaacaagtctatcaaaaattcgagaagaagctgatcgagaaattaaactacttagtttttaaaaagcagtcatccgatctgccgggaggccttatgcacgcctatcagctggcgaataagttcgagtcctttaataccttgggaaaacaaagtggattcttattttatatccctgcttggaacaccagcaaaatggatccagtgacggggttcgtgaacctgttcgacgtcaagtacgagtctgtcgataaagccaaatccttctttagtaagttcgatagcatacgctacaacgtggagcgggatatgtttgaatggaagttcaattatgatgaattcaccaagaaggcggagggaaccaagacagattggaccgtttgctcctacggaaatcgcattatcacatttaggaatcctgataaaaatagtcagtgggataacaaggagattaatctcacggaaaatatcaaactgctgtttgagcgctttggaatcgacctgagctctaacctgaaagatgagattatggagagaactgagaaggaatttttcatcgaacttattagcttatttaaattggtcctgcagatgagaaactcatggacagggactgatatagattatctcgtgagccccgtgtgcaatgagaatggcgagttcttcgactctagaaatgttgacgagacactccctcagaatgcggacgccaacggtgcctataacatcgcaagaaaagggatgattctcctggataagatcaaaaagaacaatggtgaaaaaaagcttacactgtccattactaatcgggagtggttatcttttgcacagggctgctgcaagaacggtaaacgtccggcagcgactaagaaggcggggcaagctaagaagaaaaagggtagcggacctgctgccaagagggtcaagttggacggcagcggcctcgagcaccaccaccaccaccactga

SEQ ID NO: 782 - DNA, 3855 bp, synthetic construct
  misc_feature 1..3855: note = Sequence codon optimized for human expression
  source 1..3855: mol_type = other DNA
atgcaggagcacaagaagataagccacctcacacatcggaatagcgtgcagaagactatacgcatgcagctcaaccctgtgggcaagacaatggactatttccaggctaagcaaattctcgagaacgacgaaaaactcaaagagaattatcagaaaatcaaagagattgccgaccggttttataggaacctgaacgaagacgtgctctctaaaacgcgtctggataaactcaaagactataccgacatctattatcattgtaatacggacgccgataggaaaaggctggacgagtgcgcgagcgagctgaggaaggaaattgtgaaaaactttaagaacagggacgagtataacaagttgttcaataaaaagatgattgaaattgttctgcccaagcatcttaagaacgaagacgagaaagaggttgtgacgtcttttaagaattttaccacctacttcacgggcttctttacaaaccggaagaatatgtactccgatggagaggagtcaacggccatcgcatatagatgtataaacgaaaatctccctaagcacctggataacgtaaaagctttcgaaaaggcaatctcaaagctttcaaagaatgcgatcgatgatttagatactacttactcaggactgtgtgggacaaacctgtatgatgtgtttaccgtcgactatttcaatttcctccttccacagagcggtatcacagaatacaacaaaatcatcggggggtatacaaccaatgacggaactaaggtgaaaggaattaatgaatacataaatctctataatcagcaagttagcaaaagggacaagattccaaatctgaagatactgtataagcagattctctccgagtcagagaaggtttcatttatcccacccaaattcgaggacgacaacgagctcctgagtgcagtgtctgagttttatgctaatgatgagacatttgatggcatgcccctgaaaaaggccatagatgagaccaagctcctgttcgggaacctcgacaatccctctctgaacggcatttatatccagaacgaccgttcagtcacaaacttgtccaactctatgtttggttcttggagcgtgatagaggacctctggaacaaaaactacgattccgtgaatagcaactctcgaataaaggatattcaaaaacgagaggataagcgcaagaaagcttacaaggccgagaagaaattaagcttgtcctttctgcaggtgctgatctccaactccgagaacgatgagattcgggagaagtcaatcgtggactactacaaaacaagcctcatgcagctgactgacaacctcagcgataagtataatgaagcagcaccccttctgaacgaaaactactcaaatgaaaagggcctcaaaaatgatgataagagcattagcctcatcaagaacttcctggatgcaatcaaggagatcgagaaattcattaagcccctgtctgagactaacattactggagaaaagaatgatctgttctattcccagttcactccactgctggacaatatttcacggattgacatcctctacgacaaagtacgcaactacgtgacacagaaaccttttagcaccgacaagattaagctcaactttggtaactcacagctcctgaatggttgggacagaaacaaagagaaagactgcggggctgtgtggctctgcaaagatgagaaatactatttggcgattattgacaagagtaataatagtatcctggaaaatatagattttcaggactgtgacgagtctgattgttatgagaagatcatttacaagttgttacctggaccaaacaagatgcttcccaaggtgtttttcagtgagaaatgtaaaaaactgttgagtcctagtgatgaaatccttaagatttacaagtccggtacatttaaaaccggcgataaattcagcctggacgactgccataagttgattgacttctataaggaatcattcaaaaagtatccgaattggttaatttacaatttcaaatttaagaaaactaacgagtacaatgacattcgggagttttataatgacgtagcactccagggctacaacatctccaagatgaagataccaacatccttcatagacaaactggtcgatgagggaaagatctacctcttccagctgtacaacaaggacttcagtccccactcaaagggaacccctaacctgcacaccctctactttaagatgctctttgatgagcgcaacctggaggatgttgtgtataggcttaacggagaagccgaaatgttctatcggccagcttctattaagtatgacaaaccaactcatcccaagaacactcctattaaaaacaaaaatactttgaacgataagaagacttccaccttcccgtatgacttaattaaggacaaacggtataccaagtggcaatttagtcttcacttccccataacaatgaacttcaaagcgcctgacaaagcaatgatcaatgacgacgttcggaacctgctcaaaagttgtaataacaacttcatcatcggtatcgataggggcgaacgtaatttactctatgtgtctgtgattgactcaaatggggccataatctaccagcacagcctcaacatcatcgggaacaaatttaaagagaaaacctacgaaactaactaccgtgagaaactggccacccgggagaaggaacgcactgagcaacggcgaaactggaaagctattgaatccatcaaagagctcaaagagggctatatatcccaggccgtgcacgttatttgtcaactcgtagtgaagtacgatgcgattatcgttatggagaaattgacggatggatttaaaaggggacgtactaaattcgagaagcaggtgtatcagaaattcgagaagatgctgatagacaaactgaattactatgtcgacaagaagttggacccagacgaggagggaggcctgctgcacgcctaccagctgacaaataagctcgaatcatttgataagttgggcatgcagtctggctttattttttatgtgagaccggactttacctctaagattgatcccgtgacaggattcgttaaccttctttatccacagtatgagaacattgacaaagccaaggatatgatctccagattcgacgagatcaggtacaatgcgggagaggacttctttgagtttgatatcgactacgatgagttcccaaagaccgccagcgactatcgcaaaaagtggactatctgcacaaatggggagcgcatcgaagcctttcggaacccagcgaacaacaatgagtggagctaccgaacgatcatcttggccgagaaattcaaggaactctttgacaataattccatcaactacagagacagtgacgatctcaaagcggaaatactgagtcagactaaagggaagttctttgaggactttttcaagttgctgcgcctgaccttacagatgaggaacagcaatcccgagactggagaggaccgaatcttgagtccagtgaaagacaaaaacgggaatttctatgatagtagcaagtacgatgagaagtctaagctgccctgtgacgctgatgcgaacggggcttataatattgcccgcaagggcttgtggatcgtcgaacagtttaagaaagccgacaacgtctctaccgtggaacccgttatccataacgatcagtggctgaagtttgtgcaagagaatgacatggccaacaacaaacgtccggcagcgactaagaaggcggggcaagctaagaagaaaaagggtagcggacctgctgccaagagggtcaagttggacggcagcggcctcgagcaccaccaccaccaccactga

SEQ ID NO: 783 - DNA, 4020 bp, synthetic construct
  misc_feature 1..4020: note = Sequence codon optimized for human expression
  source 1..4020: mol_type = other DNA
atgaatttccaacctttctttcagaaattcgtgcacctctatcctatctccaagactttaagatttgagcttatcccgcagggagcaactcagaaattcatttccgagaagcaggtcttactccaagacgagattagggccagaaagtacccagaaatgaaacaggcaattgacggctaccacaaggatttcatacagcgggcacttagcaacatcgacagccaggtcttcgaacaagctctgaacaccttcgaagacctttttctcagatctcaggccgaaagggccacagatgcttataaaaaagactttgagaccgcccagacaaagctgcgggagttgattgtgcactcctttgaaaagggcgagtttaagcaggagtataaaagcctctttgataaaaacttaataactaacctgctgaagccttgggtggaacaacagaatcagatcggcgactccaactatacgtaccacgaggactttaataagtttacaacatatttccttggtttccacgaaaatcggaaaaacatatacagcaaggacccccacaagaccgcactggcttaccggttgatacatgagaacctgcctaagtttttagagaacaataagattttgcttaaaatccaaaacgatcaccccagcttgtgggagcaactgcagaccctgaatcagacaatgccgcagttgttcgacggttgggacttttcccaactcatgcaagtctccttcttctccaacacgttgactcagaccggcatagaccagtacaataccattattggcggtatctccgagggggagaaccggcagaaaatccaggggatcaatgagcttatcaacctttacaatcaaaagcaggacaaaaagaaccgagttgctaagctcaagcagttgtacaaacagattctgtcagataggagcactctttctttcctgcctgaaaagtttgtggacgatacagagctctaccacgctattaacatgttttacctggaacatctccaccatcagtccatgatcaacggtcacagttataccctgttggaaagagtgcagttgctgataaatgaactggctaattacgatctcagtaaggtttacttagcccctaaccaattgtccacagtaagccaccagatgtttggagacttcggctacataggcagagctctgaattattattacatgcaggtgatccaaccagactatgagcagctgcttgcatccgctaagacaaccaagaaaatagaggcgaccgaaaaattgaaaaccatctttttagacacaccacagtcactcgttgtaatccaggcagctattgacgagtacatccagttacagccttctaccaagcctcacacacagttgactgactttataatttctctcctgaaacagtatgaaacagtcgccgacgatcagagcatcaaagtcattaatgtgttctcagacatcgagggaaagtacagctgtatcaaggggctcgtgaacaccaagagtgagtctaaaagagaggttctccaggatgagaaacttgcgacagacattaaggccttcatggatgctgtgaataatgtcataaaactgctgaagcccttcagcctgaatgaaaaattggtagcatccgtggagaaagacgctaggttttactctgattttgaggagatttatcagtccctgttaatatttgtgccactttataacaaggtccggaactacattactcagaagccttactctactgagaagtttaagttaaattttaataagcctaccctcctttccggctgggacgccaataaggaggcagacaatctgtccattcttttacgcaaaaacggaaattactacctggccattatggacaccgcaaagggagctaacaaagccttcgagcctaagaccttgaaccagttgaaggtggatgataccacggactgttacgaaaagatggtctataaattacttagtggtccaagcaaaatgttccccaaagctttcaaggcaaagaacaacgagggaaattactatcctacccccgagttgctgacttcttacaataacaacgaacacttgaagaatgacaaaaattttacattggcgtcactgcacgcttacatcgattggtgtaaggagtatattaacagaaatccttcctggcatcaattcaattttaagtttagtccaactcagagcttccaggacatcagtcagttttacagtgaggtatcttctcagagttataaggttcactttcaaacgattccctcagattatatcgaccagttggtcgcagaggggaaattgtatctgttccagatctacaacaaggacttctcaccaaacgccaagggaaaggaaaatttgcatacactgtatttcaaggcactcttctctgacgaaaatctcaagcagcccgtgtttaagctgagcggagaggccgaaatgttttatcggcccgcctctcttcagctggccaacaccactatccataaagcaggagaacccatggcggcaaagaacccacttactcctaacgccaccaggacattagcctacgatattatcaaggaccgtaggtttactactgataagtatctcctccatgtccctatcagcctgaactttcatgctcaggaaagcatgagtatcaaaaagcataacgacctcgtgcgccagatgattaaacataaccaccaagatctgcatgtgatcgggattgacaggggtgagaagcacctgctctatgtgagcgtgattgatcttaaggggaacatcgtttatcaggagtccctgaactccatcaaatctgaggcacaaaacttcgagacaccctaccaccaactcctccagcacagagaggagggaagagcacaggcccggactgcatggggcaagattgagaatattaaggaactgaaggacggctatctctcacaggtggtgcatagaatacaacagctgatattgaagtacaatgcaatcgtaatgctggaggatctgaacttcggatttaaacgtggcaggtttaagatcgaaaaacagatttatcagaagtttgaaaaggcacttatccacaagctgaattacgttgttgataagagtacccaagcagacgagttgggcggagtgcggaaagcataccagctgaccgctccctttgaaagcttcgaaaagctgggaaagcagagcggcgtgttgttctatgtgcccgcctggaacactagtaagatagacccggtgacagggttcgtggatctgctcaaacccaaatacgaaaatctggacaaggcgcaggcgttcttcaacgcattcgactccatccactacaacgctcagaagaattacttcgagtttaaagtaaatttgaagcagttcgcaggcctgaaagctcaggcagcccaggctgaatggacaatctgctcctacggcgacgagcgtcacgtgtatcagaaaaagaatgctcaacagggggaaacagtgatcgtcaacgttacagaggaactcaaggtgttgtttgcaaagaacaacatcgaggtcgcacagtcagtcgagctgaaagagaccatctgtacccaaacacaggttgacttctttaagcggcttatgtggctgctgcaggtacttttggcattaaggtattcatcaagcaaggataagctcgactacatccttagccccgtggcaaacgcacaaggtgaattctttgacagccggcatgcttccgttcaactcccccaggactccgacgctaacggcgcttatcacattgcgctcaaggggctctgggtgatcgaacaattgaaagccgctgacaaccttgacaaagtgaaactggctatcagcaatgatgattggctgcattttgctcagcaaaagccatatctggctaaacgtccggcagcgactaagaaggcggggcaagctaagaagaaaaagggtagcggacctgctgccaagagggtcaagttggacggcagcggcctcgagcaccaccaccaccaccactga

SEQ ID NO: 784 - DNA, 4086 bp, synthetic construct
  misc_feature 1..4086: note = Sequence codon optimized for human expression
  source 1..4086: mol_type = other DNA
atgaccggaatattcaaagatttcacccatctttacgaactgcaaaagacgctgagattcgaactgatccccgtaggccgtaccaaggagttgctggaaaagaaccatgtgttcgaaaaagatgagaaaattgccgagaattataaagacgtgaagaagtatttcgatagattacacaaggagttcattaaagacgcattctcacacacaaacctgcccgaaaacctgctggaagggtatgagcagaagtacttcagccacaaactgaacccaagcagagcgtctcgcatcgacctggaaaagatcgcaaagaggctgcggacaatcctcctgaagagcttcaatacagaggctgaccagtggaagaatcggtacctcaagaatattgagcagaccttaaaaaataagaatgagaagcagcagaagaaggaacttgagaagaagttgaagaagattaaagagggaacaaaaggcattgaactgtttttcaaggtggaagtgttcgattttctgaagtacaaatacccggaagcccagatcaatggcaagtcaatttttgatcccttcaataagtttgggtgctatttcaaaaagtttcatgaaactagaatcaatttttacaaggacgacgggacttctaccgccatccccacgaggattatcaacgacaatctgagtatattcctcgaaaacaagaaaatctttgagtctaaatatagcaagaagcacaaatccgtatttgcgaagaatgaactgcgcatctttgtgttgttctacttcaataactgtttctcccagaaacagatcgatggctacaataataccatcgccctgatcaattccaatgtgaaccagctgcggcaaaacaatccagaagtgagcaagaaggatctgccctttttcaagagactgttcaaacagattttgagtcagccctctaaacaggaaattgaacaagattccttcattgaaatcttccaagatgaggatgtcttcccgacaatgcagaaattcataaatgagaataagatctgtatcccaaaggcgaagtcaatcttcaagaagttcatatcaagtcagaaggtgaaaagcgacgagtacaacatttcccaaatctatgtggccaagcgatttattaatacgatcagtaacaagtggttttccaactggaacaccatacgtaatctgctgatacccaaggataagaagaacattcctgatttcatttcagtgacctctctgaaagcagcacttcaaaaaacccaaaacattgtcgaagttaacgatctgttccgaaaagagtacagagacattcttgaagagggctcagacttctaccagatcttcctgaagatttgggagaaggagtttgagaaggctaccgacatctaccttaatgaaactaaggagattgaaaagatgataacagaagacaaaaaatatttacccaacaagaaggggaggctcaagagcgggaaaaagggcagtatccagaaggaaaaattcctcgactacacccagagcgttttcgatatttacctcatgatgaaatattttagcctggaaaagggcaaggaaagggtgtggaacccggaggcactcgacgaagatgccatcggtggtttctatgagaagttcaaggaatactacgaaaacattaatacttggaaatatttcaacgtgttcagaaattatctcacaaaaaagccttataacagcgagaagatcaaactcaattttgaatgtagctcactcctgtcaggatggtctaaaaactacgattcttacggagctctgatttttgagaaaaatgagaaatactacctggggatcataaatggcaccaagtttacaaaggatgagatagaacagctgtatctggatattagaaacaataatatttcactgcgacttgtgtacaattatcagaagccagatttcaaaaacttccccaagctgtttataagatcaagcggcagcaacttcgctccggctgtgaagaaatataaccttcctatcgacagcgtcctgaatatctacgataagggcttgtttaaaacaagcaataaatcaagccaaaactaccatgagagcctcaagaaaatcatagactacttcaaactgggcatatcccagcacgagagttacaaaggattcagtttcaaatggcaggagaccagtgagtatgataatatcagcgacttttacaaggacgctacaagatcatgttataaagtgacttgggagaacattaatttcagtaagctgtatgagttgattgagtctggacggctgtacctgttccagatttataataaggacttcgagctcgacgaaaatattgcccctaagggctataactttaaggacaaaaatgggaggagaaacctgcactcaatctactggaaggctcttttttctaacacaaatttcaaaaagactattttgaaactgaatgggggcgcagagctcttctaccgcaaactcacaaagaatctcacaaaagaccctattatcacggtgaagaatcagataaaaatcattaagaaaaacaataacatattccataagaagaggttcacccagaataagatctatttccactgccccgtgtccattaacttcacagagaacgactggaagataaacacaaagatctgtaataccatacgcaacaactccaaggtcaagatcataggcatagacagaggtgaaaagaaccttgcctactactccgtgatcgatcaccaaggtaacatcttggaaaccgactcctttaatgaggtgcaagaaagggaggacagggaacccacagattaccagaaaaaactcgatcaaatacaaaaagagagggattggcaacgcaagtcatggcaggagatctcttccattaaggaaatgaaaaaggggtatatctctcaagtggttcatcagatctgtaaattgatccgtaagtacgaagctattgtggtattcgaagacctgaatataggctttaagcgaggccggtttgccattgagaagcaaatatatcagaatctggagctggcactcgccaaaaaattgaactacatggtgttcaaggatgcaaaggaagaagaaacaggacattttctccaggcctaccagctcacccctcctgtcatcaactttcaagacattggaaagcagtgtggaataatcttttatgtgcctgctagttacacctctgcgatctgcccagcttgtggttttagaaagaacataagcacatttgtcgaaaagatcgagaagaatattgacttgattaacaagttcaatattgtgtacgaccccgacaaagaccgcttctgtttcagatataagagaagtgacttcattaagtctgaaaaggaaaaggaagacgatagcaaagtaaagttatattccaacaccaagttacccgatgactttaccttctactctaacgtcgaacgattcaaatatatcagggatcagaataatcggggggggaaggttgaactcaagtatcccaacgattcactgaagaaactgttccacgaaaatgggatcaattttcaaaatttttcaaacatctctcagcttatcaagacccgcaattttgagaatgagaatttttacaaaccatttatatatatcataagtctgatactgcaattacggaacaccaccattgagattaaccaaaatgagaacaacgagaaatatagggacttcatctcttgcccacactgttatttccattccgagaataacctgatcactctgaccaaacggtacaagggcaagaagccttttgagttcaacggtgacgctaacggcgcatacaacattgctcgcaaaggcatactgatattgcagaaaatcaataaggcgaaaaggctcgaggagattgagtacggtggcttaacagtgacacagcaggaatacgacaaatacctggctctggtgagttctaaaaaggcgaaacgtccggcagcgactaagaaggcggggcaagctaagaagaaaaagggtagcggacctgctgccaagagggtcaagttggacggcagcggcctcgagcaccaccaccaccaccactga

SEQ ID NO: 785 - DNA, 3852 bp, synthetic construct
  misc_feature 1..3852: note = Sequence codon optimized for human expression
  source 1..3852: mol_type = other DNA
atgctgttcgaggcgggagtgtttagactgcttaaagaacgcttcaaaaacgagaaggacacaactgtggacggtaacaacatcttcgatgaatggacacgttggacaggatacttcaaaaagtttttcgagacccgtaagaacttttacaagtctgacgatactagtactgccattgcataccgggtgatcaatcagaacttacgaagattttgcgagaacatccaaatattcgaaaaaattagtgagaagatagagttttctgaagtggagaaatctttcgacatctcctgcgccggaattttctccctggcatactataacgcctgtttactgcagggcggcatcgatacatacaataagatcatcggcggcgaagtggatgaaaaggacaaaaaaattcctggtattaatgagctgatcaacaaataccgccaggataattcaggcgagaaaatccctttcctgaaacagctcgataagcagatccatagtgcaaaagaggcctttatcgagagtatagagacgaacaaggaattggttgggaaactgaagacattctatgaaaatgcagaggtgaagattcaatcctttaggaacctcatcgccgatattgtcactgactattcaggctatgatatcgataaaatttatctgactaaagaggctgtgagccataatgctagccgttggtttgcctcctttgagagtttcgagagggatttatttgccgtcgtagcagagaagcagaacaagctggtgtacgagttgctgaggacgcataagaatgactctaagatcagtgataaagacggcaaattcagcttccctgactttatcaagtgctcacacatcaaacgggcacttgaaaagcaggaagggaggatttggaaaggggagtactatgaggacatagtggacttcgaaaagatcaaagacgttttcactcagtttctgtgcgtgttcaaattcgagctggagcagcaattctttagaaagaccacaagcgctcagacaggcgaacagactaagatcggttatgagattttcgtgacgaagatcaacgaactcatcacgagagaaaatcccgttatcgatctggaggagaagatagccattaaaaatttcgctgatgccaccctcttgatctatcagattgctaaatactttgctgtggaaaagagacgcgggtggctggataattacgatctcgacgatcgcttctacaagtcatccgacatcggctacctgaatttttatcgggatgcgttcgagcagatagtgcgaccatataacctctttcgcaattacctcaccaagaaaccatacaacaccaacaagtgggtcctgagtttcgaaaaccccaccctcgccgatggatgggataagaacaaggagaagactaatgctgccgtcatccttcgcaaagatgggagatactacctcggcattattaaggaggactgcaagtccttattcgcagaccgatattccaaagagatgagcgagggcattgagtcaggcagctttcagaagatggcttacaagttctttcctgaggcgtccaagatgattcctaaatgttcaacccagacgaaaaacgttaaggagcacttccgaaagagctcttccgactataacctcttccatgaaaaggactacaaaatcagcgtagcgattacgaagaatatttatgaactgaacaacgtgttttacagaaaagacaacatcgaggaatctttcgttcccaaaaacgacttcgagaaaaagttaggcgtgaaaaagttccagcggcagtacctcgagatttctcgcgataacaacgggtacaagcaggcgcttgctcagtggattgagttctgcatcaggttcctgaaggcctacaaatctactaccatttttgactattcccggctgcgcgaagccaaagaatacgaaagcttggatgccttctatcaggacatcaacgccttaacctacaatatctcttttgtgccaatctctgaacagtatatcaaagaaaagaatgacaatggcgagctgtttttatttgagatctataataaggactggtctctggggcccatggacaaaaacaggaagaggaccaaaaatctgcacacattatacttcgagcaactcttttctaaagaaaatgagcaggaaaatttcttatttcagctgaacggggaggccgagttattcttcaggcctaagacggaagaaaagcgcctgggatataaggtgtgggacgcaggagagaagaagtgggtgaaggcaaaggaaaaagaggatggggcagttattgataggaaacggtacgccaaggatatcatcttatttcactgcccaattacccttaaccgcgtgtccgaaagcaagacaaaaagagaaatggacgtggaaatacgcgaggtcttaagcagcacacctggggtccacatcatcggtgtggatcgaggagagaaacacttagcttactactccgttattgatcagaatggcaaaatcattgaaactgatactctgaacagcatcggtaaggatggccgcgggaagcccgtcgagtacgcttccaagttggagaaacgggcacaggagcgagaggcatcaaggagagactgggaggaggtagaggctatcaaggaccttaaaaaagggtacatctcccaggtgataaggaatctggccgacttgattatcaagcacaatgccatcatagtcttcgaggatctgaatatgaggttcaagcagatccgcggcggaatagaaaagtctgcttaccagcagctggagcgtgcgctgattgataagctctcctttctggtgaagaaaggagaggaggaccctaagcagacagggcatattctgcgcgcgtaccagctggccgccccagtcatcgcttttaaagatatgggcaaacaaaccgggctgattttctacactcaggccgggtacacaagtaagacatgccctgagtgcggataccgccgaaacattaagtgcctgttcgaaaacattgaacaggccaagaccctcattgaaaatctggagagcattaactacaataaaaaggaggacgtgtttcaaataagctattcactggaaaaactgtccagcaaagatcagaagaaagagaagaaggtcagcaacgagctttatgcaaagactctcaaaaaagacatttttatcctgacgactaaaaacgcccttaggtataagtggtacgatcgatattcagaaaaagctaaagtcgctaaacgaggaatcgacgaatacaagggggaggtgaacgagtcagaaactaagaagggggttgtcaaagagtttaacctcaccgagtacctgaagggtctgctcaagacctacgagatcgactatgaacacggcgggatacgggaacagattctcagtgtcgcacgtgggcgggagttctataaagacttcctgtacgccctcttcctgctgactgaaactagacacagcatcagcggccgcaatacagactatatccagtgtcctgaatgcgagtttgattctcgaaaaggcttcaaggatataaaggagttcaacggggacgctaacggcgcttacaacattgctcggaagggcatcatgattctggagaaaataaaacagtttaagaaagacaacgatggtaacctggagaagatgggatggggtgacctgtccatctccattgaagagtgggataagtttacccagaaagagaaacgtccggcagcgactaagaaggcggggcaagctaagaagaaaaagggtagcggacctgctgccaagagggtcaagttggacggcagcggcctcgagcaccaccaccaccaccactga

SEQ ID NO: 786 - DNA, 3945 bp, synthetic construct
  misc_feature 1..3945: note = Sequence codon optimized for human expression
  source 1..3945: mol_type = other DNA
atgggaaagaatcaaaattttcaggaatttataggtgtgtcaccactgcaaaagaccctccgtaatgaactgatccccaccgagactacgaaaaagaacatcacacaactcgacctgctgaccgaggacgagattagggcacagaatcgcgaaaagcttaaggagatgatggacgattactacagggacgtcattgacagcacactacacgcaggcatcgccgtcgactggtcctacttgttctcttgcatgcgcaaccacttgagggaaaactcaaaagaatctaagcgggaattggagcgtactcaggactcaatacgaagccaaatttacaacaaattcgccgagcgtgccgacttcaaggacatgtttggcgccagcatcatcacgaagttgctgcctacttacattaagcagaatccagagtattcagagcggtatgacgagagtatggagattctcaaattatatggtaagtttacaacctcgctaaccgactatttcgagacaagaaagaatatcttcagcaaagaaaagatcagctctgccgttgggtaccggatagtggaggagaatgcggagatctttctgcagaaccagaatgcttatgacagaatatgtaagatcgctggcctggacttgcacggccttgataacgagattaccgcctacgtcgatgggaagacactcaaggaagtatgctcagatgaggggttcgcgaaggccattacgcaagagggaatcgaccggtacaatgaggcgatcggcgccgttaatcagtatatgaacctgttatgtcagaagaacaaagcactcaaacccgggcagttcaaaatgaagcgccttcataagcaaatcttgtgcaaggggaccacgtcctttgatatcccaaaaaagtttgaaaacgacaaacaagtatatgatgccgtgaactcgttcaccgaaatcgttatgaaaaacaacgatttgaaacgcctcctcaatattacccagaacgtgaacgactatgatatgaacaaaatttatgtggcagctgatgcttactctacaatttcccaatttatttccaaaaaatggaatctgatcgaggagtgtctactggattattactccgacaacctgcctggtaaaggaaatgcaaaagagaacaaggtaaagaaggcagtcaaggaggaaacctaccgatcagtgagccagctgaatgaactcatcgaaaaatactatgtagagaaaactggtcagtccgtgtggaaggtcgagagttacatttctcggcttgcagagactatcactttggagctgtgtcacgagattgagaatgatgagaaacataatctgatcgaggatgatgataagatcagtaagataaaagagctgcttgatatgtatatggacgctttccatattatcaaggtgtttagagtgaatgaggtcctgaatttcgacgaaactttctattccgaaatggatgaaatctaccaggatatgcaggagatcgtgcctctgtataaccacgtgagaaactacgtgacacagaagccctacaagcaagaaaagtacaggctttatttcaatacacctacattggctaacgggtggagtaagaacaaagagtacgacaataacgccattatcctcatgagagacgacaaatactatctgggcattctgaatgctaaaaagaaacctagtaaacagacaatggccgggaaggaagactgtcttgaacatgcttacgctaagatgaattactacctgcttcctggagccaataagatgcttcccaaggtgtttttatcaaaaaaaggcattcaggactatcaccccagcagctacatcgtggagggctacaacgaaaagaaacatatcaagggcagcaaaaacttcgatataaggttctgccgcgacctaatcgactatttcaaggagtgcattaaaaaacaccctgattggaacaaatttaacttcgaattcagcgctaccgagacttatgaagatataagcgtgttttatcgggaagtcgagaaacagggctaccgcgtcgaatggacgtacatcaacagtgaggacatacaaaaactagaagaggacggacagctgttccttttccagatctacaacaaagacttcgccgtgggtagcacaggaaaaccgaacctgcacacactctacctgaaaaacctctttagcgaagaaaatctcagagatattgtgttgaagctgaacggggaggctgaaattttttttagaaagagctctgtacagaaacccgtcatccacaagtgcggatccatcctggtgaatcgcacatacgagatcaccgagtccgggaccacacgggtacagagtattcccgaatccgaatatatggaactgtataggtatttcaacagcgagaagcaaatcgagctctccgacgaagcaaagaagtacctggacaaagttcagtgcaataaagcaaaaacagacatcgtaaaggattacaggtacaccatggataagttcttcatacatctgcccatcaccattaatttcaaagtcgacaaggggaataatgttaacgctattgcccaacagtacatcgctgagcaggaagatctccacgttattggaatagatcgaggcgagcgcaacctgatctacgtgtcagtcatcgacatgtacggtcgaatattggaacaaaagagcttcaacttagttgaacaggtgagctcccagggtaccaaaagatattacgattacaaggagaagctacagaacagggaagaagagagagacaaggcccggaagagttggaagaccatcgggaagataaaagagctgaaggagggatatctgtccagtgtaatacacgagatagcacagatggtcgtgaagtataatgccattattgccatggaagacttaaactatgggtttaagaggggccggtttaaagtggagcgccaggtgtaccaaaaattcgaaaccatgttgatcagcaagctcaattacctcgcagacaagtcccaggcggtcgacgagccaggaggcattcttcgaggatatcagatgacctatgttccggacaatattaaaaacgttggccgtcagtgtggcataattttttatgtgcccgccgcttacactagcaaaattgacccaactaccggtttcatcaatgccttcaagcgagacgtggtgtctactaacgatgccaaggaaaattttctcatgaagttcgatagcattcagtatgacatagagaaagggctgtttaagtttagttttgattataagaattttgcaacacataaactgacactggcgaagactaaatgggatgtctacactaatgggacccggatccaaaacatgaaggtggagggtcattggctctctatggaagtcgagctgacgactaaaatgaaggagctgctcgacgatagccatatcccatacgaggagggccagaacattctggacgatctgagagagatgaaggatatcactaccatcgtgaatggcatccttgaaatattttggctgacggtgcagttgcggaattcaagaatcgataacccagactatgataggattatttcccccgttcttaacaacgatggagaattctttgatagcgacgaatacaattcgtacatcgatgcgcagaaggcgcctttaccgatagacgccgatgcaaacggcgctttttgcatcgccttaaagggaatgtatacagcaaaccagattaaagagaattgggttgagggcgagaagctcccagctgattgtctaaaaattgaacacgcctcatggctggccttcatgcagggcgaaaggggaaaacgtccggcagcgactaagaaggcggggcaagctaagaagaaaaagggtagcggacctgctgccaagagggtcaagttggacggcagcggcctcgagcaccaccaccaccaccactga

SEQ ID NO: 787 - DNA, 3960 bp, synthetic construct
  misc_feature 1..3960: note = Sequence codon optimized for human expression
  source 1..3960: mol_type = other DNA
atggaggagaaagagctggggaaaaatcaaaacttccaggaattcattggcgtctctccacttcagaaaaccttacgtaacgagctgatccccaccgaaactacgaaaaaaaatatagcccagctggatctcttaaccgaggacgaagtacgggcgcagaatcgagagaagctcaaagagatgatggacgattactaccgtgacgtcatcgactccacactgcgcggagaactgctgatagactggagctacctcttcagttgcatgaggaaccacctgagtgagaattccaaagagagcaagcgtgagctggagaggacgcaagattccgtgcggagccagatccatgacaaattcgctgaacgagctgattttaaagatatgtttggagcaagtattatcacgaagctgttgcctacttacataaagcagaattcgaagtatagcgagcgatatgacgagtccgtcaagattatgaaactgtacggcaaatttaccacttccctgaccgattacttcgaaactagaaaaaatatcttttcgaaggaaaagatatccagcgctgtgggatatcgaatcgtggaggaaaacgcagagatttttttacagaatcagaacgcttacgacaggatatgcaaaatagctgggctcgatctgcacggcttagacaacgaaatcactgcctatgtggacggcaagacattgaaggaagtgtgctctgatgagggcttcgcgaaagtgatcacacagggcggtatagaccggtataacgaggccataggcgcagtgaaccagtatatgaacctcttgtgtcaaaagaataaggcactgaagcccggccagttcaaaatgaaacggctgcataagcagattctctgcaaagggacaacatctttcgatatacctaagaagttcgaaaacgataagcaggtctatgacgcagtgaactcatttacagagattgtgaccaagaacaacgatttgaagaggctgctcaatattacccagaatgctaatgactacgacatgaacaaaatttacgtggtggcagatgcttattcgatgattagtcagtttattagcaagaagtggaatctcatcgaagagtgtttgttggattactactccgacaacctgccaggaaaagggaacgcaaaggagaacaaagtgaaaaaggccgtgaaagaagagacataccgatctgtgtcccagcttaacgaggtcattgagaagtattacgttgagaaaaccggccagagcgtgtggaaggtggaatcctatatctctagtttggccgagatgatcaaactagagctctgccacgaaattgataatgacgagaaacacaatctgattgaagacgatgagaaaatcagcgaaatcaaagaactgctggatatgtatatggatgttttccacatcatcaaggtctttagagtaaacgaagtgttgaattttgacgagacattctatagtgagatggacgagatctatcaagatatgcaagaaatcgtgcctctgtataaccacgtccggaattacgtgacacagaagccctataagcaggagaaatacaggctctacttccatacccccacccttgccaatgggtggtctaaaagcaaagaatacgacaacaacgccatcatactagtacgcgaggataaatactacttggggatactgaatgcgaagaaaaagcccagcaaggagatcatggctggaaaggaggactgttctgagcacgcttacgccaaaatgaactattatctgctgcccggtgccaacaagatgctccctaaggtttttttgtctaagaaagggatacaggattaccatccatcctcatacattgtcgagggatacaatgaaaagaagcacattaagggatctaaaaattttgacattagattctgtcgcgaccttatcgactatttcaaggagtgtattaagaaacacccagactggaacaaattcaattttgagttcagtgccacggaaacttatgaagatatttcagtgttttacagggaagtggagaaacaaggttaccgcgtcgagtggacatacattaacagcgaggacatccagaaacttgaggaagatggacaactgtttctgtttcaaatctataacaaagactttgcggtggggagcacaggcaaacctaaccttcataccttatacctgaaaaacctgttctcagaagagaatctgagagacattgtactaaagctaaatggcgaagcagaaatcttttttaggaagtcctccgtccaaaagcccgtcattcacaaatgcggatccatcttggtaaaccgcacgtacgagatcaccgaaagcggcaccacaagggtccagagcatcccggaaagcgagtacatggagctctataggtacttcaatagcgagaaacaaatcgagctttccgacgaggccaagaagtatctcgataaggtccagtgcaacaaggccaagacggatatagtgaaggattatagatacacaatggacaagtttttcattcatctaccaatcacaatcaactttaaggttgacaaaggaaacaatgtgaatgccatcgctcaacagtacatagcggaacaggaggacctccatgttattggcatcgacagaggcgagaggaatctcatttatgtttcggttattgacatgtacgggagaattctggagcagaaaagcttcaacctggtagaacaggtgagcagccaaggcacaaagcggtactatgattataaggaaaaactgcagaatcgcgaagaggaacgagacaaggctcggaagagttggaaaaccattgggaaaatcaaggagctcaaggagggctacctgagtagcgtgatccatgagatcgcccagatggttgtcaagtacaatgcaatcatcgctatggaggacttgaactatggtttcaagagaggtcgcttcaaggtggaacggcaggtttatcaaaagttcgaaacgatgctaatctcaaagctgaactaccttgcagataagtcacaggcggtggatgaacctggtggtattttacggggataccaaatgacctatgttcccgataatattaagaatgtgggaagacagtgcggaattatcttttacgtccccgcggcttatacctcaaagatcgatccaaccactggtttcataaatgctttcaagagagatgtggtcagcactaatgatgcaaaagaaaactttctgatgaagttcgatagtatacagtatgacatcgaaaaaggtcttttcaaattttccttcgattataagaatttcgcaactcacaaactgacccttgccaagacaaagtgggacgtttacactaacggcacccgcattcagaacatgaaagtggaggggcattggctctcaatggaagttgagcttactaccaagatgaaggagctgcttgatgattcacacatcccgtacgaggaggggcagaatatcctggatgacctgagggaaatgaaagacattactactatcgtaaacgggattttggagattttttggctcactgtccagttacgtaattctagaatcgacaatccagattatgaccgcatcatatcccctgtactgaacaacgatggagaattctttgacagtgacgagtacaattcatatatcgatgctcagaaagccccgctcccaattgacgccgacgccaatggcgccttctgtattgccctgaagggcatgtacaccgccaaccagatcaaggaaaactgggtggaaggcgaaaaactccctgcagactgtctaaagatcgagcacgcctcatggcttgcctttatgcagggggaacggggaaaacgtccggcagcgactaagaaggcggggcaagctaagaagaaaaagggtagcggacctgctgccaagagggtcaagttggacggcagcggcctcgagcaccaccaccaccaccactga

SEQ ID NO: 788 - DNA, 3984 bp, synthetic construct
  misc_feature 1..3984: note = Sequence codon optimized for human expression
  source 1..3984: mol_type = other DNA
atggtaggaaacaagattagcaactcctttgattcttttacaggaataaacgccctgtcaaagactctccggaacgagctgatccccagtgactacacgaagcgccacatcgcagagagtgactttatcgccgctgacacaaataaaaacgaagaccagtatgtggcaaaagagatgatggatgactactatagggattttatcagtaaggtcctggacaatttgcacgacattgaatggaaaaacttattcgagctaatgcacaaggcaaagatagataaatcggatgctacatccaaagaactgatcaagatacaggacatgctgaggaaaaagatcggcaaaaagtttagccaggatccagaatacaaagtaatgctgagtgctggcatgatcaccaagatcttaccaaagtacatacttgagaaatacgagactgaccgggaggataggctagaagcgataaaacggttctatggttttacagtttattttaaggagttctgggcaagccgtcagaatgtgttttccgacaaagctatcgccagtagcatctcataccggattatccatgagaatgccaagatttatatggacaacttggatgcttacaatagaattaagcaaattgcttgcgaagaaatcgaaaaaatagaggaggaggcctacgacttcctgcagggtgaccaattagatgtcgtttataccgaagaggcatacggaagattcatctctcagtccgggatcgacctgtacaataacatctgtggtgtaatcaacgcccacatgaatctttactgtcagtcaaagaaatgcagccgatccaagttcaagatgcagaagctacataaacagattttatgtaaggccgaaactggatttgaaatccctctgggattccaagacgatgcccaggtgatcaatgccattaacagcttcaatgctctgattaaggaaaaaaacattatcagccggctccgcacaatcgggaagtcaatatcattatacgacgtgaacaagatttacatcagttcaaaggcttttgaaaatgtctccgtgtacatcgaccacaagtgggacgtgatcgccagttcgctgtataagtattttagcgagattgtcaaaggcaacaaggataaccgagaagagaaaattcagaaggaaattaagaaggtgaaatcatgtagcctgggtgacctccagcgccttgtcaactcttactacaagatcgactctacctgcctggaacatgaggttacagaattcgtgaccaagatcattgatgaaatcgacaattttcagatcaccgatttcaagttcaatgacaaaatttcactgattcagaacgaacagattgtgatggacatcaaaacttatctggacaagtacatgagcatttaccattggatgaaatcctttgtgattgacgagctggtagataaggacatggagttttatagtgagctggatgagcttaacgaggatatgtctgagattgttaatctctataataaggtgcgtaactatgtcacccaaaagccctactctcaagagaaaataaagctgaacttcggcagtcctactctcgcagatggctggagcaagtcgaaagaattcgataacaatgcaatcattctcattagagatgaaaaaatttacctggcaatcttcaatccccggaacaaacccgctaagaccgttatcagtggccacgacgtgtgcaactcagagactgattataaaaagatgaactactatcttctcccgggcgctagtaagacacttcctcacgtgttcatcaagtcgcgtctttggaacgaatcccacggaattccagatgagatcctgaggggatacgagctcggcaagcacctaaagagctccgtgaactttgatgtggagttctgctggaagcttattgattattataaagaatgtataagttgctatcctaattataaagcatacaatttcaaatttgctgatactgaaagctacaacgatattagcgagttctacagggaagttgagtgccaaggttacaaaatcgattggacctacataagctccgaagatgtcgaacagttggatagggacggccagatctacttgtttcaaatctacaataaagacttcgcaccaaattctaagggtatggataacctccacacgaagtatctaaaaaatatcttttccgaggacaatcttaaaaacatagtgataaagctgaatggcgaggcagaattgttctacaggaaatcttcagttaagaagaaggttgagcataaaaaaggaacaatactggttaataaaacttacaaggtcgaagacaacacagagaattctaaggaaaagcgggttataattgagtccgttcctgatgattgctatatggagttagttgactattggcgcaatgggggcatcggaatcctgtccgataaggccgtgcagtataaggataaagtatcacattacgaggccactatggacattgtaaaggatcgccgttataccgtggataaattctttatccatctccccatcaccattaattttaaggccgatggcagaattaatatcaacgagaaagtgctgaagtatatcgcggaaaacgacgagttgcatgtcattgggatcgaccggggggagcgaaatctgctctacgtgtctgtgattaataagaagggtaaaatcgtcgagcagaagtcttttaatatgatcgagagttatgaaacagtgacaaatatagtcaggcggtacaactataaggacaaactggtcaacaaagagagcgccaggacggacgcccgcaagaactggaaggaaataggaaagattaaggagatcaaggaaggatatctcagccaggtaatccatgaaatttccaaaatggtgcttaagtataacgctattatcgtgatggaggatttgaactacgggttcaagagaggcagattccgcgtggagcgacaagtctaccagaagttcgagaacatgttaatctccaaactggcctatttggtggacaagagtcggaaagcagacgagcccggtggggtcctcagagggtaccaactcacgtacatcccagattctctggaaaaattggggtcccagtgtggcattatcttctatgtgccagcggcctacacctcaaaaatcgaccccctgactgggttcgtaaacgtctttaattttagagaatacagcaacttcgaaacgaaattggactttgtgcgatcactggactccatacgctacgataccgaaaaaaaactgttttccataagctttgactatgataacttcaagacacacaataccacactggcgaagaccaagtgggtgatataccttagaggagagaggatcaagaaagagcacaccagctacggctggaaggacgacgtgtggaatgtggagtcaaggataaaagacctgttcgactctagccacatgaaatatgacgacgggcacaacctgattgaggacattttggaactagaatccagcgtgcagaagaaactgattaatgagctgatcgagattattagactcaccgtgcagctacgcaactccaagtctgagcgatacgacagaaccgaggccgagtatgatcggatcgtcagccctgtaatggatgagaacggccgcttctatgattcggaaaactatatattcaatgaggaaactgagctcccgaaagacgccgatgcgaatggggcctactgtatcgcgctcaagggcctgtataatgtcattgctatcaaaaacaactggaaagagggggaaaaatttaatagaaaattgctcagcctcaacaactacaattggttcgactttattcagaatcggaggttcaaacgtccggcagcgactaagaaggcggggcaagctaagaagaaaaagggtagcggacctgctgccaagagggtcaagttggacggcagcggcctcgagcaccaccaccaccaccactga

SEQ ID NO: 789 - DNA, 3837 bp, synthetic construct
  misc_feature 1..3837: note = Sequence codon optimized for human expression
  source 1..3837: mol_type = other DNA
atgaaagagttcactaatctgtacccagtgagtaagacactccgcttcgagctgattcccgataagcggactaaagagtacctggagcacagcgacctgattgctaaggatgaacaccgcgccgagtcatacaaaatcgtaaagaagatcattgaccgctaccacaagaagtttattgacgacgtactgagtacaacaaagctccagtacaccaaggaaggtaagctaaactccttggaggatttttacttcttatacaccaacagcaataaaacagatgccgataaaaaagccctggacaaagtgaaggaattgctccgaaaacagatcgtcgacgcactcaagcaggataaccggttcaagcgaattgacaaaaaagagttgattagagaggacatcctgcaagtgataaagcctgaggaacgtgcactgatagatgagtttcaggactttaccacatactttaccggcttccatgagaatcgcaaaaatatgtactcagcagaggcccagagcacagccattgcctatcgtttgatccacgagaatctgcccaaattcgttgacaatatagccatcttccagaaaatcctcaaaagcccgatagcggagaatctgcccaccctctataaggacatggaagaatacctaaatgtcaatagcatcgaagaaatgtttatgctagactactatagcgatgtgctcacccaaccgcaaatagaggtgtacaacgctattattggcgggcgaacacttgaggatggcactaagatacagggcgtgaacgagtttgtgaacctgttcaatcagcagcagacctctcgcgataaccgattacctaaactgaaaccattgtttaaacagattctctccgacaaggaggcgatctcctggctccccgaggaatttgaaagcgaccaacagctgctgaacgctgtaagagagttctatatctccttgactaataacgtgatgcagcagctcaaagaactccttttgaacctgcctaactacaacttggacaagatctacatccccaacgatctggccctgacggatatcagccaagcactctacggagactggagtgtaatcaagaacaggatctacgaggacttcaagaatgagaaccctcagaaaaaaaatgaaaagacagaaaagtacgaggagagaattagcaagttgatcaaggaaaaagacatcttcaatattggctacctgaattcgtgcctcaccaatcaaactaaggatgtgtgcgcacacttcacctcactgggggcagtgaacacagaagctaagcagacggagaacatattcctgcagattgagaacgcttatacagacgtgcgggaattgcttgaatacgattatccacaagataagaatttaagtcaagatcggattcaggtgaataagctgaagacgctgctggacgccatcaagaatctgcagcacttcgttaaacctcttcttgacactgaaaacgaagctgaaaaagacgaaagattctatggcgagttgagtgtgctgggcgaagaattgaacaggataactcccctctataacaaggtgcgaaaccggatgacacgcaagccttattcgatcgaaaagtttaaactgaatttcgagaacagtaccctgctggacggctgggatgtcaacaaggagagagacaacagctgtgtcatactcaggaggaacggtctgtattttctggcgattatgagaaaagacagcaacaagatattttcagacgctccggttggggatggcaaggattattatgaaaaaatggagtataaactgctccctggagcaaacaaaatgttgcccaaagtattcttttctaagtctcgcattgacgaattctgtcctagtccaagtttactggagcactacgagcaggggacccacaaaaagggggaaaaatttagcctgaaagattgccatgagctgattgacttcttcaagaccagcatcaaaaaacataaggattggagtcaattcaattttaaattctcaccaacagagagttatgaagatctgtctggtttctacagagaggtggaacagatgggttataaaatcacctacaagaacatcccagttagctatatcgacaccatggtgtcaaaagggcgcctctttctttttcaaatttacaataaggatttctcaccatattccaagggcactcctaacttgcacaccctttattggaagatggtgtttgatgagcagaatctcgcggacgttgtctataaactaaacggacaagctgaaatcttctacaggaagaaatcccttaatctgggcaaggtgacccatcctgctaaccaggcgatcaagaacaaaaaccagttaaatcccaaaaaagagtcctcgtttaagtacgatctcatcaaggataagaggttcacggtggacaaattccagttccacgtccccattaccatcaacttcaaggccatcggtcttgggaatataaaccagtccgtcaataagtatatccaaaacagcccagacctgcatatcattggaattgacaggggcgaacggcatctgttatatattaccgtcatcgatagcaaggggaatattaaggaacagttttctctgaaccagattgtgaacatgcacaaagggaacacttacgagacggattatcatgaacttctggacaagcgggaggaggagagacaaaaggagcgtcagtcttggaatactatcgagtccatcaaggaactgaagcagggctacttatctcaggtgatccataaggttgtgactttaatggtgaaatataaggccattgtcgttctcgaagatttaaatatgggttttaagcgggggcggcagaaagtagagtcctctgtttaccagcagttcgaaaaggcactcatcgagaagcttaattacctagccgataagcagcaaaatcccaacgagtatggcggactgctaaagggatttcagcttaccaacaaatttacatcttttagggagatgggaaaacagaacggatttctcttttacattccagcttggaacacttctaaaatagacccagttaccggattcgtcgaccttctccatcccaagtacgagtcagtggagaaagcccgcgctttcatctgtaaattcaagaacatccgattcaacgaaaacaagggatggtatgagtttgtttttgattacaatgattttacaactaaggctgagggcacgcagacaacctggactctatgcacacagggctccagaattgagacattccgtaataaagaaaaaaattctagctgggacaatagagaaatcaatctgaccaaggagtttcactcattgtttgaaagctgcggaattgcccccaacgaaaacctaaaagaagtcatcgccaaacagactgagaagtccttctacgagaggcttctaaaactgctgaatcttaccctccagatgaggaactccataaccggaacggacatcgactacctgatttcacctgtggcaaatactgacgggaagttttacgattcccggaactgtaaggacagcctgccggagaatgccgatgccaatggggcctataatattgctaggaagggtctgtgggtagtcagacagatacaacaggccgcaaatacagacaaggtccagttctccataacgaataaggagtggctgaacttcgcacaaacaaaaccatatctcaatgataaacgtccggcagcgactaagaaggcggggcaagctaagaagaaaaagggtagcggacctgctgccaagagggtcaagttggacggcagcggcctcgagcaccaccaccaccaccactga

SEQ ID NO: 790 - DNA, 3903 bp, synthetic construct
  misc_feature 1..3903: note = Sequence codon optimized for human expression
  source 1..3903: mol_type = other DNA
atgaagcagtttactaacctttatcagcttagcaagaccctgcgcttcgagctgaaacctataggaaaaacgaaggagaacatcgaaaagaacggtattcttgaacgggataaccagagggatatcgcatacaaggctgtcaaaaaagtgatcgacgaataccacaaggcattcatagagatgatgctgaacgactttgaacttcagtacgagctacttgaagaataccatcacctctaccatatctccaacagcgaggagcctaagaaaaaagagaaactgcaaaagatccaagagaatctccggaagcaaatcagcgatagattcaccaagtcagaacagtacaagaggctctttggcaaagaactcattaaggaggacttgagcgaattcgtaaagacaccccagtttgggaattacattagagcccagaaaggagacgagtacaccgacgaacaagtacgacagattcaggagcgaacgcttgaagacatcgatcagttcaaagacttcacaacatacttttccggtttccatcaaaaccgccagaatatgtatgtggccgacgacaaagctaccagcatcgctcaccgcatgatcgatgagaacctgccaaagttcatagacaatatgaaaacatttgctgaaattgccgagtccgacgtggctgagcactttgctgatctctataaggagatggaaagctatctcaacgtctcagatatacgggagatgttccaattggattactttagcatggtgctaactcagaaacagatcgacgtttataacgcaattattgggggcaagactctagccgatggcacaaagatccaggggctgaatgagtatgtcaatctgtacaatcaacagcaaaaaaagaaggaagataggctcccgaagctgaaacccttattcaaacagattttgagcgagcgcaacgctattagctggttgccagaagagtttaaggatgataatgagatgctgcagtctatcggcaaatgctaccaggacctcaatactcttgtcttcggcaagctgaagaccctccttgaaactttgaacgacttcgatctagataatatctacctccctaacgacctgcagctgaccgacatagcccagaagcactatgggagttgggccgtgattaacaaggcaatcgaggaggacttgaagactgtgaacccacaaaaaaagcgggaatcaggggaaaagtatgaggagagaatcgccaagctgctgaaggcaaatgatagctacagcatcggatatatcaactcattactgaaagatcggatggaggactttaagccactggaggcttacttctctaatatcggagccgaagatgacggtaagcaacagaaactgagccactttgcccgcattgagaatgcttacacagaggcaaagtcactgttaaccgctgagtatccggatgacaagaagctgtctcaggacaaggcaaacgtggaaaagattaagaatctgctggacgccattaaggaccttcagcgattcgtcaagcccctgctaggttgcggcacggaatctgacaaagatagtcatttttatggcgagttcacacctttgtgggaacaactcgatcagatcacacccctttataacatggttcggaatcgaatgacccagaaagcttactccgtcgaaaagattaaaatcaacttcgataattcaactctgttggccggctgggacctaaacaaggaggcagacaatacatgtaccctgctaagaaaagatggtctgtactacttagtcatcatggacaagtctaacagtcgtgtcctgaaggcggagaatctgttgagcgacggggactgttatgagaagatggagtataaactgttgcccggcgcaaataaaatgcttccaaaggtgtttttttccaaatcccgaatcggcgaattccagccctcagagtctgttttagagaattataaaaacgagacacacaaaaagggagacaacttcaacatcgaccattgccatgagctgataaatttcttcaaaaaatcgatcggaaagcatgaggactggtccaagtttggatttaaattttcggacacccgcacttaccaggaccttagtggcttctacagggaggtagaacagcaggggtataaaattactttcagaaatgtgtcagtggattacatcaaccaactggtcgacgaaggcaaaatatacctatttcagatctataacaaagacttcagcccatatagtaaaggaacccccaacatgcataccctctactggaaaatgctttttgatgagaggaacttagcggatgtggtctacaaactgaatggcgaagccgaggtcttctttagaaaaaaatctgtaaaggtggaacgtcccacgcatcctgccaatcagcctatcgccaataaaaatgcccagaacaataagaaggaatccacttttgcctacgacctcattaaggataggaggtatacagtggacaaatttcagttccacgtgcctataactatgaatttcaaggccgctgggttgaataatattaacccattggtgaatgagtatctgaaaatgagtaatacaacccacattatcgggattgacagaggagaacggcacctcttgtacctctctctgattgatctcaagggcaatatagtagagcaatattccctgaatgaaattgggaatatctacccaacgaactacagggatctgctgaatgcaaaagaaaagcagcgggacgaagctcgtaggagttggcagaccattgagaacattaaagagctgaaagagggatacatgtcgcaggttgtacacaagatcgcccagctgatgctgaaatataacgccatcgtcgtgctggaagatctcaacttcgggtttatgcgggggcgccagaaggtggagaagaacgtgtatcagaagtttgagaagatgctcattgacaaactcaactacctcgtggataaaaaacttgatgcggatgccatgggaggagtgctgaacgcttaccagctgacaaacacttataaggttttccacgatcaatacaaaaaacaacaaaacaccattggtaaacaatgtggtttcttattctacatccccgcatggaacacttccaagatggacccaactactggcttcgttaacctcctagataccaggtacgagaacatggagaaagctaaggcattctttggcaagtttgattcaatcagatatgacgcccttaaggattggttcgagttcgcgtttgattataataatttccacaacaaggcagaagggacgagaacacaatggacattatgtacctatggaacacggatagaaaccaaaagagacgccgcacagaacaataacttcgtttccaccgaagtggaccttacacagaagtttaaggccctgtttgccgaaaagcagatcaaccccagcgggaatttgaaggagcagatctgcaaccagaccgatgcctccttctttaagagtctgctgaacttactgcgcctcaccctgcagatgaggaactctatcacgggtacagaaaccgattacctcatttctccggtgcagaatgcgaatggagagttttacgacagccgaaaatgcgacgctaatctgcctgagaacgctgatgcaaatggcgcgtataacatagctcgcaagggcctgtgggttatagaacagatgaagcaggccgacgatctctccaatattaaactcgcgataagtaacaaggaatggttgagatctgcccagaagctggagaaacgtccggcagcgactaagaaggcggggcaagctaagaagaaaaagggtagcggacctgctgccaagagggtcaagttggacggcagcggcctcgagcaccaccaccaccaccactga

SEQ ID NO: 791 - DNA, 3873 bp, synthetic construct
  misc_feature 1..3873: note = Sequence codon optimized for human expression
  source 1..3873: mol_type = other DNA
atgaaggacttaaaacgctttatcgggatatacccagtgagcaagaccttacgctttgagctacgaccagtgggaaagactctagagtggattgagaagaataaggtgttggaatccgacgaacaaaaagctgaggactaccctaaagtgaaaacactgatagacgaatatcataaagtatgcatccgggagtcgctaaaagatgctcacttcgattggatgccccttagactggccctcgaaaagtaccagaaatccaaatcagacgaggataaagccgccctggagaaggaacaggccgtcatgaggaaacaaattgccaccgcaattaaggagtttagacactataaagagctgacggctccaacaccacaaaagctgatcgacaatgtcttccccggcatctacgagagcgatgctctgaagtccttcaatcgctttagcgtctacttccgggggttccaggagaatcgcaacaacatctactcagcagaagccatttcaactggcgttccttatagactggtgcacgacaatttccccaaattcctcgccgacatcgaggtgtttggtaacataaaggcaaactgccccgaagtgattgagcaagcagcgacagaactgcaaccaatcctggaaggcgttatgcttgaagatatcttcacaatagacttctataattcattgctgacccaggacggaatcgacttcttcaaccaggtactgggggggacagccgaagaggacaaacaaaagtatcggggaataaatgaatttagcaacctgtacaggcaacagcatcccgagcttacggcaaaaaagaaggcattgacaatgattcccctctttaagcagattctgtccgacagagacaccttatcatacatcccacagcagatcgagagtgaacagcagctcattgaactcctgaatcagttctactcccatattactgcctttgaccacaacgggaagaccgtcgatgtgttgaaggagctcactaaactgacaggaaatatcaacaactacaaccccgacggcatttacttgtctgcgaaatcgctaaccgatgtttcccagaagctgttctccaagtggaacattattacagagaggttaagtgaagaagccatcaagcggtttggggatgtgtctattaccaaaaacaaaaagaagatcgatgcttatctaagtaaagacgcttacgccctgagcgagatcccgctggataacgagcactccctgtccatgttttttgcagaattaccgaaaaatatcgagaacgttggaagcaattggcttcagttcatggagtggtgtaaaggagagtcaaagcagttgttcctgaataacgctgacggcaccgaaattgtgaaaaacttccttgactcgatcatggagatactgcataggtgttccgtccttgtggtttccgtggaacatgatctggataaggacttttataacgactttctgccactctacgctgaactggaaaatgccgtgatggtgtataatcgggttcgaaactttctgaccaagaagccatctgatacaaagaaatttaaactgaattttggcgtcccaagcttgggcgacggctgggatcagaacaaggagcgcgacaataaggccatcatcttgttcaaagatggtaagagctatctcggcatcatgaatgctaaagacatgcctatgattaaagagcgtaatgaaagcacaccaagcagctacaagaagatgatatacaaactgctcgctgaccccgctaaggattttcctcacactttcttctcaaaaaaaggcatcgacacgtatcatccttcgtggtatatccttgatgggagagaacaaggtaaatataagaagggcgaaaccttcgataagaagttcatgagggatttcatagacttttataaggatgctgtggcaaagcatcctatatggtctaagttcaatttcgtatactctcccacagagagctacgaagacatcggcgcattcttcaacgaggtgagtaagcaggcctacaagattcgctttagctacattgaggagagtcaaatcaacgagtggattaataacggacagctttatcttttccaattgtataacaaagactacgccgaaggagccagaggccgaaaaaacctgcatactctctattgggagtccatttttagccctgaaaatctctctaacattgtgctcaagttgaatgggcaggcagaactgttttatcgtccacagagcatcaaacagcctgtcactcacaagatgggctctaagatgctgaaccgccgcgataagagtggaatgccgattcctgaggcaatctaccgctcactgtacctctatttcaacagtaaaaagactgaaagtgaactcaccctggtggagaagtcatacttagatcaagtagttgtgaaagacgtaactcacgagatcgtgaaagacagacgatacactaagcctgagtttttctttcacgtccccattacctttaatgtgaacgcggacggaaatgagtacatcaatgaacaggtgatggagtatctaaaagacaaccccgatgtaaatatcatcggaatcgatcggggtgagcggcatcttatttacctcacgctaatcaatcagagaggagaaattctgaagcagaagaccttcaacatggtggggaactacaactatcacgccaaattagagcagagagaacaggagcgcgatcaggcaaggcgttcctggcagagtatcggacggatcaaggaattgaaagagggcttcctgtctgcagttatccacgagatcacaatgatgatgattgagaacaatgccatagtcgtcctcgaagatctgaattttggattcaaaagggggagattcaaggtagagcggcaagtctaccagaagttcgaaaagatgctgatcgataagcttaattatttgtctttcaaggatcggaagacagacgatgctggcggcatcctccgaggttatcagctagcgcaacagtttacatcattccagcgtctcggtaaacagagcggttttcttttctacataccagccgcttatacatctaaaatcgatcccgtcacggggtttgtgaaccactttaactttaacgatataactaatgcagagaagcggaaagcgttttttatgaaaatggagcggatcgagatgaggaatggcgacattgagttcgaatttgactacagaaagtacaagacttatcagacggactaccaaaacatttggaccgtcaattcttccgggaagaggattgttatgaggctggatgagaatggccgaaaaaagatgaccgactattatcctacccaggagatcgttagggcctttaaagaaaagggtatgcttctgaacgaaggggccgatattaaggctctgttagccgacatagacgcgagtcctatgaacgctagtctctacggggtgatgttctacgccttccagaagacactccagatgagaaactccaactcaaccaccgaagaggattacatactcagccccgtggcacagaacggtaagcagttcaacaccgataccgaggccaataaaggcagggacactaatggcaattggattagcaagctgccggtcgacgccgacgcgaacggagcttatcacatagccctgaaagggctgtacctgttgatgaacccgcagactaagaaaattgagaatgagaaatggttgcagtttatggtgcaaaaaccctataatgataaacgtccggcagcgactaagaaggcggggcaagctaagaagaaaaagggtagcggacctgctgccaagagggtcaagttggacggcagcggcctcgagcaccaccaccaccaccactga

SEQ ID NO: 792 - DNA, 3849 bp, synthetic construct
  misc_feature 1..3849: note = Sequence codon optimized for human expression
  source 1..3849: mol_type = other DNA
atgaagactttcaatgacctgacaggtttatattccctttctaaaaccctgcgatttgagttgaagcccgtgggcaagactaaagacaacatcgagactaagggcatcatcgcccaggacgaaaaacgggctgaggagtataaaaaggtgaaggacattatcgacagataccacaaaaagttcattgagatgtgcttggccaatctcaagctgaaaacaatctccgatggtaacaacgatagcctgaaggaatatgtcactctggcaagcaaggcaaataaggacgagaaagaggacaatgattttaaagatgtgaagactgcccttaggaaacagatcgtcgatgcctttaagaagggtgggagctacagcgacctgttcaagaaggagttaatccaggtccatctgcccgatttcgtgaccgatgaacaggaaaagcagatggtcgaaaacttcggcaagttcaccacctactttaccggctttaacgaaaacagacagaacatgtatagcgacgaagagaaatccacatccatcgcataccggctgattcatgagaatcttcccatgtttattgacaacatcaagtcattcgccaaaattgccgagcacgaggacatcgattttctgcccgacatagaaaacggtttcaaggaggagcttaagcggctgaaagctcagtcaatctccgaagtgtttgatttagcaaatttcaccaataccctgacacagtcccagattgattcatataacgcaattatcggcgccagacatgacgagaacggggacaaggtgcaaggcataaaccagtatgtgaatctgtacaatcagaaaaacaaggacgctcgtttgccattgttaaaacccctgtacaagatgattctgtcagacagaggagccctgagctggttgcccgaagagtttgctacggacgaagagatgcttgctgcgatcaatgagacgcacggaaaccttaagaatgtcatgacagacgtgcgcaaactcctccagaatattgactcctacgacactgaacacatttatattgccaatgataaggggctcactgacatatctcaacagatctttgggcagtatgatgtgtatacctctgctattaaagctgagctgagagactcgatcacaccaagcgctaaagagcgcaaagacccagaactactcgaaaagcggatcaatgacatattcaaggcaagtaagagtttcagtatcgagtacctgaatagtcacgtggatagtgacaaaaccatccagagctactacaaggagctgggcgcctatgaccgtaacggagaacagaggattaacctgttttcgcaaatcgagctagcatacgtcgacgcacatgacgtactgctcggcaaacacacaaacctgaatcaaagcgaggactcaataaaaaaaatcaaggccctgctcgacgcctacaaagccctcttacacttcatcaagcccctgcttggcaatggcgatgaagcagataaggacaatgaatttgatgccaaactgcgcgctatctgggacgaactagatatcgtgacacctctgtacgacaaggtccgcaaccggctaacccggaagccttactccactgagaagattaagttgaacttcgacaatgctcaactcctgaacggctgggatatgaacaaagagccagattgtacatccgtccttctcagaaaggacggccaatattacttagcgattatggataagaaatcgaaccacgcattcgatatcgacgaactgccttgcaatggggagtgctacgataaaatggattataaactcttgcctggagctaataagatgctacctaaagttttttttagcaaaagccgcataaaggagtttgccccaagcaaggaaatttgcgacgcgtatcagaaggggacacataaaaagggcgccaattttagcattaaggactgtcgcagactgatagatttcttcaaggattccatagctaagcacgaggattggtccaagtttcccttcacttttagtgatacgtctacctacgaggacataagtggcttttacagagaggtggaacaacagggatacatgctcggatataggaaagttagtgtttcttttattaaccagctggtcgatgaagggaaactctacctgtttcagatctggaataaggatttttcagagtattcaatgggaactccgaatatgcacacgctgtactggaagatgttgttcgatgaaaggaatctggccaatgttgtctacaaactcaatggtcaggcagaggttttctatcgtaaaaagagcctggatctaaacaaaaccacaatccatcgggccaatcagcctattgctaataaaaatatgcagaacgagaaacgagaatcaacattctgttacgacattgtgaagaacaggaggtacactgttgataagttccagttccatgtgcctataaccatcaactttaaggccaccggatcagacaatataaatgccagcgttctagacgtaataaggaacaacgggattgaacacattatcgggattgatcgaggagagcgacacttgctttatctgtccctgatcgatatgaagggaaatatcgtgaaacagatgactttgaatgatattatcaatgaatataaggggaacacctacaccactaactataaagaacttctccaggcgcgagagggagacagaaaagaggctcgtcagaattggcaaaaaatcgagaacattaaggagctcaaggagggttacctttctcaggtggtacatgttattacaaagatgatggtggagtataaggccatagtggtactggaagacctgaatggggggtttatgagaggcaggcaaaagattgagcgccaagtgtatgagaaattcgagaagatgctgatcgataagctgaattactatgttgacaaacagagggacgccaacgaaaacgggggcttgttacacgcctatcagttggccagtaagttcgatacattcaaaaagttaggtaagcaatccggctgtttgttttacatccctgcgtggaatacttctaagattgacccagtgacgggtttcgtaaatatgctggatacccgctatgagaacgctgataaagcacggaacttcttctcaaaattcaaatccattaattataacgcagacaaaaactggttcgagttcgtgattgacgattactctaagtttaccgataaggcaaaggacacacgaacagactgggtactgtgcacttacggtaccaggatcaagacctttcggaaccccgaaaaactgaaccagtgggataacaaggaaatcgtcctgaccgacgagttcaaaaaagtgttcatggaagctggcatcgatataaacggaaacctcaaggaagcaatatgtacacttaccgagaagaagcatcttgaatctctgatgcagttgatgaaactcctcgtccaaatgcgcaacagcgagacgaatagcgaggtggactacctcctgtctccagtcgcagatacggaggggcacttctacgattccagaaactgcggagacaacctcccgaaagacgcggatgccaacggagcttataatatcgcccggaaaggcctatgggctgtgatgaagatcaaagccagcaagccgcaagaaaaccttaagctcggcatcagtaacaaagaatggttacagtttgcgcaggaaaaaccatacctcaacgataaacgtccggcagcgactaagaaggcggggcaagctaagaagaaaaagggtagcggacctgctgccaagagggtcaagttggacggcagcggcctcgagcaccaccaccaccaccactga

SEQ ID NO: 793 - DNA, 3735 bp, synthetic construct
  misc_feature 1..3735: note = Sequence codon optimized for human expression
  source 1..3735: mol_type = other DNA
atgtattatcaggggttaacaaaactgtacccaatctcaaagaccattcggaatgagctgatcccagtggggaaaacactcgaacacatccggatgaacaacattctggaagctgacatccagcgcaaaagcgactacgaaagggtgaaaaaactcatggatgactaccacaaacaactgatcaatgagtctctgcaggacgtacatctgtcctatgtcgaggaagctgcagacttgtacctcaatgcatctaaagacaaggacattgtcgacaaatttagcaagtgtcaggacaagttacgcaaggagattgttaacctcctaaagtcgcacgagaactttcccaaaatcggcaataaggagatcataaagctcctgcagtccctgagcgataccgagaaggactacaatgcgctcgattcttttagcaagttttacacgtatttcacaagctacaacgaggtgcggaaaaatctatatagtgacgaagagaagtcctcgacagccgcttatcggctaataaatgaaaatctccccaaattcctggataacataaaggcttactcaatcgcaaagtcagccggggtgagagctaaagaacttactgaggaggaacaagactgcctgtttatgactgaaacgttcgagagaaccctgacccaagacgggatcgacaactacaatgaactgatcgggaaactcaacttcgccattaacctttacaaccagcagaataacaagctgaaaggattcagaaaggtgccaaaaatgaaggagctgtataagcaaatccttagtgagagggaagccagcttcgttgatgagttcgtggatgatgaggcactactgactaacgtggaatcattcagcgcacatatcaaggaattcttggagtctgactccctgtccaggttcgcggaagtgcttgaggaaagcggtggcgagatggtttacattaagaatgatacctctaaaacaaccttcagcaatattgtgttcggatcttggaacgtaattgacgagcgcctcgccgaggaatatgacagcgccaacagtaagaagaagaaggatgagaagtactatgataagcgccataaagagcttaagaagaataaaagttattcggtggagaagattgttagcctcagcaccgagacagaggatgttatcggcaagtacatagaaaaattgcaggcggatataattgctataaaagaaacacgcgaagtgtttgaaaaggtggtgcttaaggagcatgacaaaaacaagtctcttaggaaaaacaccaaggccatagaggctatcaagagcttcctggacacaataaaggatttcgagcgggacatcaaattgatttcaggaagtgagcacgagatggagaagaaccttgcggtctatgcagagcaagagaacatcctgtctagcatcagaaacgttgattccctgtacaacatgagccgcaactatctcacccagaaaccgttttccaccgaaaaattcaagctgaatttcaatagagccactctgctcaacggatgggacaagaataaggaaaccgataatttggggattctgctggtgaaagaaggtaagtattatttgggaataatgaacactaaagccaataagtcattcgtaaacccaccaaagcctaaaaccgacaatgtgtaccacaaagttaactataagctcctcccaggacctaataagatgctcccgaaagtgttttttgctaagagcaatctggaatattacaagcctagtgaagatctgctggccaagtaccaggccggaacacataagaagggcgagaattttagcttggaagattgccactccctgatctcctttttcaaggactccttggaaaaacatccggattggtctgaatttgggttcaagttttcagacactaaaaagtacgacgacctgtcagggttttacagggaagtcgagaaacagggctataagattacctacacagatatcgacgtggagtatatagattccttagtggagaaggacgagctgtacttgtttcaaatttacaataaagacttctcaccctacagtaagggcaattacaacttacacaccctctacttgactatgttgtttgatgagagaaatctacgaaacgttgtttataaattaaacggcgaagctgaggtattctatagacccgcctccattggaaaggatgaactgataatccataaatcaggagaggagatcaagaataagaatcccaaacgggccatcgataagcccaccagtacatttgagtacgatattgtcaaggaccgaagatacaccaaagataagtttatgctccacatcccagtgactatgaactttggcgtcgacgaaacgcgtcgattcaatgaggttgtgaacgatgcgattaggggtgacgacaaggtacgggttattggaatagatcgcggagaaagaaatttgctttatgtcgtcgtcgtggactccgatggcactatcctggagcagatttcccttaattcaattatcaacaacgagtactcaattgaaaccgactaccacaaactacttgatgagaaagagggagatagggaccgtgcccgaaaaaactggaccactatcgaaaacatcaaagagctgaaggaaggctatctgtctcaggtcgtaaatgtgatcgcaaagctcgtactgaagtatgacgctattatctgtctggaagacctgaattttggcttcaaaaggggtcgtcagaaggtggaaaaacaagtgtatcagaagttcgagaagatgctgatagataagcttaactatcttgtgattgacaaaagccgctcccaggaaaatcctgaggaagtggggcacgtcctcaacgccttacagctcacatccaaattcacatcttttaaggaactggggaaacagaccggcatcatttactatgtgcctgcttatctgacgagcaagatcgatcccactaccggtttcgccaatttgttctacgtgaaatacgagtctgtcgagaaatctaaggacttttttaatcgctttgacagtatatgttttaataaagtcgctggttatttcgaatttagttttgattacaagaacttcacggatcgggcctgtggcatgaggagcaaatggaaagtgtgcactaacggcgagcggatcattaagtaccgaaatgaggagaaaaattcttctttcgacgataaagtcatcgtgctgactgaggagttcaagaaactgttcaacgaatacgggattgcattcaatgactgcatggatcttacagacgccatcaatgctatcgatgatgcctccttttttaggaagctcactaagttattccagcagacactgcaaatgagaaacagtagtgcagacggctcccgtgattatattatcagccctgtcgagaatgataacggtgagtttttcaactccgagaaatgcgacaaatcaaaacccaaagacgctgacgcgaacggggcattcaacatcgcacggaagggcctctgggtattagagcagctgtacaacagttcttcgggcgaaaagctaaacctggccatgacgaacgcagaatggctagaatacgcccagcagcacacaattaaacgtccggcagcgactaagaaggcggggcaagctaagaagaaaaagggtagcggacctgctgccaagagggtcaagttggacggcagcggcctcgagcaccaccaccaccaccactga

SEQ ID NO: 794 - DNA, 3852 bp, synthetic construct
  misc_feature 1..3852: note = Sequence codon optimized for human expression
  source 1..3852: mol_type = other DNA
atgaaggatctaaaacagtttatcggaatttatcccgtgagtaaaactcttcgattcgagctgaaaccaatcggcaagactcaggagtggattgaaaaaaaccacgtgttggagcacgactggaagcggacagaggattacccaaaggtgaaggaaatgattgatgcctaccacaaactgtgtataggaaaaagcctgaagaacatggatttcgactgggtgccgctgcgggacgcaattgagagaaataggcaggagaagtcggatgggagcaagaaagctctggaggccgagcaaacaaaaatgagaaacaagatacatgaccaactatccaaattcgagcactataagaagctcaatgcggacaccccgagcctgttgatcaaccatattctgcctcaggaggacgccttagaaagcttcaaaaaatttgccacctatttcgaaggatttcaaaagaaccgcaagaatatttatagcaaggaggcaatctcaaccggtgtcccttatcgtctcgtgcacgacaacttccccaagttcctggccaatattgaggtgttcgaaaacctgcaggagctgtgccccgaggtgattcaacaggcagcaaccgagatggcgccattcctgcaaggggtaatgatagaagacgtgttcaccgtgggcttttataacaccatcctgacccaagacggtattgatttctacaaccaaatacttggcggagtggtgaaggatgagagacactatcagggaatcaaccagcttacgaatctgtacagacaggctcatccagaccttacggctaatcggcgctctatgaccatggttcctttattcaagcagatactgtctgatagagagactctgagtgacatctcaaagcccatagaatcagaagagcagctaatcaagacagtgacaagcttttatagaagaatcactgactttaccctcaatggcaactgcgtcaatatcattagtgaactggctgcacttgctcaatcgttgaacacttacaatcctgaagggatcttcatttccgctaaatcattaaccgatgtgagtcacacactttatggtcactggaacaaactaaatgagaaactgtacgaaaaagccgttgaggcaatcggcgatatccaggtggctaaaaacagaaagaaagtggaggcttacctgaacaaagacgcttacacgctctctgagctgagcttcggcgacgacatatctctggctcagtacttcacatccatatccgccgcaagtggggcaacaaatagcctgtgggtgcaatttcagtcctggtgtaaaaccgcagaaaagccaaagtatgttcataacgaggccggaacggagctggtaaagatgctccttgactctattatgaacgtacttcataagtgctctgccctcgtcgtaagcatggaaaacgacctggataaggacttttataacaagttcctccctctgtacgctgagctagaaaatgttattctcgtctacaatagggtcaggaattttctcacccagaagccaagctcaacaggcaagattaagttgaagtttgatattccttccttgggggccgggtgggggatcaacaaggaaaagaagaataaggcaatccttttgtttaaagatgggcggagctaccttggcattatgaacgtcaaaggtaccctggacttcgacgataaagctgaacccggcgagccaacatataaaaagatggtctgcgttaatcacagtaagccttacatggatctccccaatagtttttttcgacagacaggcattgacaagtataagcccagcgagaggattttaaagatttatgaggcctttaagaaagattccaagagcgtcgatattaaagaagtgaggggactcatcgactattacaaggaggcaattactcgaaacgaagactggaatagcgtttcgttcacctactcacctaccgagacatacgaaaccatcgatgacttttacaaagaggtggccaaacagtcctaccaggtgagctttaaagacatatcacagaaactggtggatgagtgggtcgagaatggccagctctacctgttccaactctacaataaggattacgccgaaggcgcgcatggacgcaaaaacctgcatacactgtactgggaatccctcttcaccgcagagaatctgagcgatatcgtgatcaaattgggctcaaatgccgagctgttttaccgcccgcaagctattaagaagcctgtgaaacatgaagtaggaactaaaatgctgaatcggcgagataaaagcggcatgccaatacccgacgccatatacctttccctctaccaattctacaacggcaagaaagaggaagccgaattaacagacgaggagcgggcctatattagtcaagtaatagttaaggatgtgcagcacgaaatcattaaggaccgccgctacactaaacagtttcactatcagtttcatgtccctatcgtgttcaatgcaaacgcgaacggaaaagtcaagttcaacgacaaagttatggattacatccaggataaccccgatgtaaatattattgggattgaccgtggtgaacgccacctcatttacctgaccctcattaatcagagaggggagatcttgaagcagaagacttttaatgtggtgggcaactataactatcaggaaaagttaaagcagcgcgagaaggaacgtaaaaacgcccagaagagttggcaagacatagagagaatcaaggatcttaaagagggtttcttgtccgctgttgtgcacgaaatcgcccagatgatgatcgaatataacgccatcgtggtcttggaagatctcaatcgaggatttaaaagggggagatttaaggttgagcgtcaggtctaccagaaattcgagaaaatgcttatcgacaaattaaactacctgtcatttaaggacagggaaatcgccaacgaaggtggaattctgagggggtatcagctcacagagatgacactgaattactccgacatcggccggcagacaggtttcctcttctatatcccagccgcctatacgtccaagatcgatcccgttaccgggtttgtgaatcacttcaacttgaatgacatcaccaacgccgagaagcgcaaggccttcttgatgaaaatggaacggatggaaatgaaaaatgggaacgtcgaatttgaattcgactaccggaaattcaagacgtttcagaccgactaccagaacgtgtggactgttaatactagcggaaaaaggataatctttgacactgaaactcgaaaagcgaaagacgtgtatccaaccaaggagatcgtccaggcatttgcgaatcggggaatcgtcctggaggagggaatggatctgaaagcgatcatcgccgaagtagagcccgattctaagaacgccgcgttcttcaggtcactattctatgcattcgagaacacattgaggatgcggaatagtaatgctgagactcaggaagactacatcctgtctccggtggctatcagcggcaaacagttctgtactacagatgaagcaaacaagggcaaggatgccaacggtaattggttatccaagctcccagtcgacgcagatgccaacggggcttatcatatagctctaaagggcctgtacctgctgaataaccctcaaacgaagaaaatcgagaatgagaagtggtttcagtttatgattgagaagccctatatcgagaaacgtccggcagcgactaagaaggcggggcaagctaagaagaaaaagggtagcggacctgctgccaagagggtcaagttggacggcagcggcctcgagcaccaccaccaccaccactga

SEQ ID NO: 795 - DNA, 3852 bp, synthetic construct
  misc_feature 1..3852: note = Sequence codon optimized for human expression
  source 1..3852: mol_type = other DNA
atgaagaccttcaatgatctcacagggctgtatagtctctcaaagactctcaggttcgaactcaaaccggtgggaaaaactaaagacaatatagaaaccaagggcatcattgctcaagacgagaagagagcagaggaatacaaaaaagtgaaagatattatcgatcgataccacaagtcattcatcgatatgtgcctagcgggccttgtccttcgaaccaccagcgacggtaacaatgattctctggaagattatgtcgccctcgcctcaaagtcaaaccgggacgagaaagaagagaaggacttcgatgacgtgaagaccgcgctgcggaaacaaattgtagacgcatttaaaaaaggcaacagctacagcgacctgtttaaaaaggagcttattctgaatcacctccctgatttcgtgacggatgagcaggaaaaacaaatggtggagaacttctctaagttcaccacctactttacaggctttaacgaaaaccgcaagaacatgtactcggacgaggagaaatcaacggctattgcctaccgcttgattcacgaaaatttgcccatgtttatcgacaatatcaagagcttcgcacgaattactgagcaggaggacatcgacttcattgctgatatagaacatagttttagagaggaactgaagggacaatctattacaaaaatgttctcacttgagaatttcacaaacactttaacgcagggccagatcgagctatacaataagatagtcggcgggcgggtggaggacagtggagccaaaaagcagggcattaacgagcacgttaacctctataatcaaaagcataaggatgcccgtttgcccctgctcaaaccactatacaagatgattctgtcagatagggtcgttctcagctggcttcccgaggagtttgcaaccgacgaggagatgttagatgctattaatgaaacacataataatctgaaagacgtgctggtcgacgtgcgggaattactgcagaatattgacaactatgatactgaacacatctacatcgccaacgataaggggttgagtgacatcagccagcagatcttcggacagtatgatgtatacacgtcagctataaaggcagaattacgcgacagcattacccctagtgcaaaggagcgtaaagaccccgagctgctggataagcgcatcaataatatttttaaagcatccaagtccttcagcatcgactatctcaatagccacgtggagttaggaaagaccattcagtcctattacgcccagctgggtgcctacgacagaaacggagagcagcggattaaccttttgtcccaaatcgacctagcgcatgtggacgcccttgaagttctatccggcaaacatactaacctgaatcagagcgaggagagcatcaagaaaataaaggctctgcttgatgcctataaagccctgcaacatttcataaaacccctgctgggaaacggcgacgaggcagataaggataatgaatttgatgctaaactgcgggcgatttggaacgagctggatataataacacctctgtacgataaggtgagaaacagactcaccagaaaaccatactccaccgaaaagatcaagcttaatttcgataatgcccagctgctcaatgggtgggacatgaacaaagaaccagactgcactagcgttctcctgaggaaagatggtcaatattatctagcaattatggataagaaaagcaaccacgcctttgatacagacgacttgccttgtgatggcgagtgctatgagaagatggagtataagcagatggccctgcctatgggtatgggtgcctttgtgcgcaagtgctttgggacggctaaagcgctcggatggcagtgtccccgccatctaatgacctctgatggcaaaataatcatcaaagacgaagaagctcagaaggtgctgcctgaactgatcgactgctataaatccttccttgacatctacgagaaagacggtttcaaatataaaaccttcagctttaagttcaagccaagttcagagtatgaaaagctgtcgcacttctttgccgaagtgccgtcccagggatacaagtgtagtttcaggaacgtttctgtcagctttatcaatcagctggtggatgaagggaaactgtatttatttcagatctggaacaaagatttttctgaatactctaaaggcacaccaaacatgcataccctctattggaagatgcttttcgatgaaaggaacttagcaaacgtggtgtataaattgaacgggcaagcagaagtcttttaccgtaaacggagcctggatcttgacaagacaactattcaccgggccaatcagcccatcgcgaacaagaatatgcagaatgagaaaagggaatccactttttgctatgatattgttaagaacagacgatacaccgttgacaagttccagttccacgttccaattactatcaacttcaaggccactggaggggacaatgtgaacgcttccgtgctcgacgtcatcaggaataacggtattgagcacatcatcggcatcgatagaggggagcgacacctgctgtatctgtcactgattgacatgaagggaaacatcgttaagcagatgaccctcaacgacattatcaacgagtataaggggaatacatacacaaataactataaggaactgctgcaggccagggagggtgaccgcaaggaggccagacagaactggcagaagatcgagaacatcaaggagcttaaggagggttacctcagccaggtagtacacgtgattaccaagatgatggtcgaatacaaggctatcgtcgtactggaggatctgaacggcggcttcatgcgggggaggcaaaagatcgaacgacaggtgtacgaaaaatttgagaagatgctcatagataagctcaactattacgtagacaagcagaaggacgccaatgagaatggagggttgctgcatgcttaccaattggccagtaagtttgatacatttaagaaattaggaaagcagtccggatgtctattctacattccggcctggaatacctctaagatagaccctgtcactggcttcgtgaatatgctggacacacgctacgaaaacgccgataaagcacgcaactttttctcgaaatttaagtccatcagctacaatgccgacaagaactggttcgaattcgtgataggcgattactccaaattcaccgacaaagcaaaagacacacggacagactgggttttgtgtacctatgggaccagaataaagacatttagaaatcccgagaaactgaaccagtgggacaataaggaaattgtcttaacaaatgaatttaagaaggtgttcatggaagctggcatcgacataaatggcaacttgaaggaggcgatctgcacgttgactgaaaagaagcatttggagtccctcatgcagcttatgaagctgctggtccaaatgcgtaattctgagactaacagcgaagtggactacttgcttagtcccgtagctgacacggagggccacttttatgattctaggaattgtggagataacctgcctaaagacgcagatgcaaacggggcctacaacattgctaggaaaggcctgtgggctgtgatgaagatcaaagctagtaaaccacaagagaatttgaaactcgggatctccaataaagagtggctgcagtttgcccaggagaaaccatacctcaatgataaacgtccggcagcgactaagaaggcggggcaagctaagaagaaaaagggtagcggacctgctgccaagagggtcaagttggacggcagcggcctcgagcaccaccaccaccaccactga

SEQ ID NO: 796 - DNA, 4104 bp, synthetic construct
  misc_feature 1..4104: note = Sequence codon optimized for human expression
  source 1..4104: mol_type = other DNA
atgaagactatagataagttctgcggccaggcgaatggctattcaaggtcgattaccctgagaaacagattaatcccaatcgggaagacagaagagaatattcaaaaccagaacctgctcgacaatgacatcatacgttctcgcgcctacgtggaggttaaaaaaatgattgacgatttccatagatccttcattgaagatgtgctgtctaagattgagttgaaatgggacgatctgtaccatcaattcgacctgttccagaatgagaaggataaacagaagaagaccatcatcaagaaagaaatggaaacttgccagggggagatgcgcaagcaaatagtcaaaaagttcaaagatgatgatcgattcgataagctgttcaagaaggaccttctgactgaatttgtgccaaccgtcataaagaacgacgagcttggtacaattagtgacaagcagacggctctgaacgtgttcaaggggttcgcaacctacttcaccggctttcatcagaaccggcagaacatgtacagtgaaaaagctcagtctacggccataagcaacaggatagtgaacgaaaatttcccgaaattctatagcaacgtgaaagtgtttgagtatctacaggataatttccctgagatcatcagccaaacagagcaatcactctctgtactccttaaggggaagagacttgcggatattttcacagaagatggattcaacgccgtcctatcccagagggggatcgacttttataacactatcatcgggggcgttgccggagaagcaggtacccaaaaacttcagggcctgaacgaggagattaacctagctcggcagcagttacccattgaagagaaatacaaactcaaatgcaaaatgtctgtcctgtataaacaaatcctcagtgatcgatccacaaccagctttatcccagcaggatttgagagctcaaacgaagtgtacgaatctatcaagcagtttaaagaactcagcttgaatacaatcattagcgaggctaagaccctgttcgagaagtctgactataacctggaacacatctatgtgaccgctaagggtgtgacagaattctccttgaagctgtttgggaactggagtatactgcacgacggcctgtttttaattgagaaggacggagccaaaaaatccctctccgaaaagcagatagaaactttacggagggaaattgctaagcgtgattactccctgtccgaattgcagaatgcctacgagatgtgggcgaaggaaaatgacgttgcggttgagaaaaccgtcaagaactactttaagattgcagagttgagggctaatgaaaagactaaagagaagtgtttcgttgagatcctgaagaagatagagtctgcatttgagaagatagacttcgagaaacaggagaatctgatcaaagagaaggagagcgctacgccaatcaaggatttcttagatgaagtgcagaatttgtatcactacctgaagctggttgactatagaggggaggagcaaaaggacaccgatttctacagcaaatacgatgagatcctacagaccctgagcgaaatcgcgcctttgtacaacaaggtgaggaattttgttacaaagaaacctaacgagatcagaaaaatcaaggtgatgttcgattcaagtagctttctgaacggctggggaaccgagtacggaactaaagaagcacacattttcatcgactcaggaaaatactatctgggcatcgtgaacaagaagcttgacaaaaaagatgtggaatccctcaaagccgacggggaacacatggtcagtaaggtaatttatgatttccagaagccagacaacaaaaatacgcctagactctttatcagaagcaaaggggagagttttgcaccagctgtctccaagtacaacctgcccatcactgatattattgatgtgtacgataaagggctttttaaaaccgagtacagaaaaattaatcccgaggagtataaaaaggctctcgaaaagcttattgactactttaagttagggttcagtaggcacgacagctataagcattataatttttcctggaagaaaacgtcagactatgccgatatcgctgatttctacacggacacaataaaatcttgttatcagctgaaatttgagaaggtcaattttgactgcctgctgaatctcagtaattcaggaaagctcttcctgttccagatctacaataaagactacagtacaggcaaggacggaggaaatggctccaccggtaagaagaaccttcatacactctattgggaaaatctgtttagcgaggaaaacttgcgaaacgtttgtttgatgcttaatggtaaagccgaactgttctggcgggatgccaaccccaatgtgaaggcagtctgccacaaaaagggatccatcctaatcaacaggactacctcagatggcgagacaatcccggaagagacatatcaggagatctacaaatacaaaaacccggataagcaggaaaaagacttcaaactgagcgatgcagccaaggagctcctggacagcggtaaggtggtgtttaaagacgccaagtttgatattatcaaggaccaccacttcacacaaaaaacttacctctttcactgcccaattaccatgaactttaaagcccccgaaattaaacgcaaattcaatgagaacgtacagcaggtcctcaaaaataaccctgatataaaaataatcgggctagaccgcggcgagcggcatctcatatacttgagtctgatcaatcagaagggtgagattgagttgcaaaagacccttaacctcgtggagcaagtgcgaaacgataagactgtgtctgtcaactatcaggagaagttggtgcagaaggaaggtgagcgtgataaggtacggaagaattggcaaatcatctccaatattaaggaactcaaggagggctatttatcaaatatcgtgcacgagattgccaagctgatggtggacaacaacgccatcgtcgtcatggaggacctgaatctgggcttcaagcgcggtcgcttcgccgtcgagcggcaagtatatcaaaaattcgaaaacatgctcattgaaaaactgaactatctggttttcaaggacaaggaaaacacagaacccgggggagtgctgaatgcataccagttgacagacaagacagccaacgtttccgatatcggcaagcagtgcgggtggatattttatattccagctgcctacacttcaaagatagaccccaagaccggcttcgcaaatctgttttacacggccggcatcaataatatcgaaaaaaagaaagcattctttgataaatttgacagtatcaggtacgacagaaaaaccgacagcttcattttttcttttgattactcaaagtttggagacaacactgacttctacaaaaaatgggaggtatactccaagggcgagcgatttgtgttcgacaagcctgaccactggaagagctataaaaaaattgaaacttcgtccaagaagtcagagaaggcagtaatatgtgtgaatcctactgaggaactcaaggtactgtttgataaacaggacattaattggaattctgagaagaatttcattgacctaatccataccgttcagggcaaaagggagaactgtgtgttctatgacggactataccggagctttaccgccattttacagatgcgcaactcgaatgccaaaaccggggaggactatatcatttctcccgtgatggcggacgatggtacattttttgattcccgcgaggaattcaaaaagggcgagggatctaaactgcccgtcgatgcagatgctaatggagcctatcatatcgcccttaagggccttagccttctgaaacggtttgacgtcgcttcggaggcggaactcaagaagttcgatatgaagatttctaacgctgactggttcaagtttgcccaggaaaaaagctacgctaaaaaacgtccggcagcgactaagaaggcggggcaagctaagaagaaaaagggtagcggacctgctgccaagagggtcaagttggacggcagcggcctcgagcaccaccaccaccaccactga

SEQ ID NO: 797 - DNA, 3792 bp, synthetic construct
  misc_feature 1..3792: note = Sequence codon optimized for human expression
  source 1..3792: mol_type = other DNA
atgaagaaaatagacaactttgtggggtgctatcctgtttcgaagactctgagatttaaggcaatacctataggcaagacacaggaaaacatcgaaaaaaaacggttggtggaggaagacgaggtgcgagccaaagactataaagccgtgaagaagcttatcgacagataccatcgggaattcatcgaaggagtcctggataacgtgaagctggacggacttgaggaatattacatgttgtttaacaaaagtgacagggaggagtccgataacaaaaaaatcgaaatcatggaagaaagatttagacgagtcatcagtaagtcctttaagaataacgaagagtataagaaaatatttagcaagaaaattatcgaggagattctgccaaactacatcaaggacgaagaagagaaagaactggttaaaggcttcaagggcttctacactgccttcgtcggctatgcacagaaccgagagaacatgtactctgacgaaaaaaagagtactgctatcagctatcggatagtcaatgagaacatgcctcggtttatcacaaatattaaggtctttgagaaagctaaaagtatcctggacgtggataagatcaatgagattaatgagtacatcttaaacaatgactattacgttgacgactttttcaatatcgacttcttcaactatgtactgaatcagaagggcatcgatatttataacgcgatcattggagggatcgttaccggggatggtcgtaaaattcaggggctgaacgagtgcataaatctctataatcaggaaaacaagaagatccgcttaccccaattcaagcccctctacaagcaaatcttaagcgagagtgaatccatgtccttttacatcgacgagatcgaatcagacgacatgctgattgatatgctgaaggagagcctgcaaatcgactctactattaacaatgccattgatgatttgaaggtgctctttaacaatatcttcgactacgacctcagcggcattttcataaacaatggtttgcccattaccacaataagcaatgatgtctatggacagtggtcaaccatatcagatgggtggaacgaaagatacgacgtgcttagtaacgccaaagacaaagagtccgagaaatactttgaaaagaggcgcaaagaatataagaaggttaaaagctttagcattagtgatctccaagagttaggggggaaggatttgagtatttgtaagaaaattaacgaaatcatctctgagatgatcgacgattataaatcgaaaatcgaggagatccagtatctcttcgatatcaaagagctagaaaaaccactcgttaccgatctgaataagattgaactgattaagaatagcctagatggactgaaacggattgagcgctacgtgatcccgtttctgggcactggcaaagaacagaatcgcgacgaggtgttctatgggtacttcataaagtgcatcgacgcaattaaagagattgacggagtgtacaacaagacgcgcaattacctcactaagaagccatactcaaaggataagttcaaactttattttgaaaaccctcagctgatgggaggttgggacagaaataaggagtccgattaccggtccactctcctgaggaaaaacggaaaatactacgtggctattatcgataagtcttcttcaaactgtatgatgaatatagaagaggatgagaacgacaactacgaaaagataaactacaaactgctgcccgggccaaataagatgctacccaaagtgttcttcagtaagaagaacagggagtactttgcccctagcaaggagatcgaacggatctactccacgggaacctttaagaaggacaccaatttcgtgaaaaaagactgtgagaacttaattacattctacaaggactccctggacaggcatgaagactggtctaaatcatttgatttttcattcaaggagtcgagcgcctaccgcgatatctcagagttttacagggatgtcgagaaacagggctaccgagtgtctttcgacttgctgtcctccaatgcggtgaacaccctcgtcgaggaaggtaagctgtacctgttccaactctataacaaagacttctcagagaaatcccacgggatccctaatctgcacaccatgtactttaggtccctcttcgacgacaacaacaagggcaacatacgtctgaacggcggcgctgagatgttcatgcggcgagcctcactcaacaagcaagatgtgaccgtgcataaggctaaccagcccataaaaaataaaaatttacttaatccaaaaaagacgactaccctaccatacgatgtttacaaggataagaggttcacagaagatcagtatgaggtccacattccaatcacaatgaataaggtgcccaacaacccttacaagatcaaccacatggtccgcgaacagcttgtaaaagatgataacccctatgttattgggatcgatagaggcgagagaaatctgatttatgtggtggtagtggacgggcaaggtcacattgtggaacagctctctctgaatgagattattaacgagaacaacggaatctccatcagaaccgactatcataccctgctggatgcaaaggaaagggaacgggatgagtctagaaagcaatggaaacaaattgagaatatcaaagagcttaaagagggatatattagccaggtcgtgcacaagatttgtgagctcgtagagaaatacgatgcagtcattgccttggaggacctgaattcgggatttaagaactcccgcgtgaaggtggaaaaacaggtatatcagaagttcgagaagatgcttatcactaagttgaattatatggtagacaagaaaaaggattataacaagccaggtggcgtgctaaatggctatcagttgacgacccagtttgaatctttctccaagatgggcacccagaatggcattatgttttacatccccgcgtggctgacttcaaaaatggatccgacaaccggatttgttgatctgctcaagcccaaatacaagaataaggcagacgctcagaagtttttcagccagttcgatagcatacgttacgacaatcaagaggacgctttcgtgttcaaagttaactatacaaaattcccacggacagacgccgactacaacaaggaatgggagatctacacaaacggtgaacgtatcagggtatttcggaaccctaaaaaaaataatgagtacgactacgagactgtcaacgttagcgagcgcatgaaagagttattcgactcttatgatcttctttatgacaagggggaactaaaagagacaatctgcgagatggaagagtctaagttttttgaagaactgataaaattgtttcgcctcaccttgcagatgagaaatagcattagcggtaggacggatgtcgattatctgattagtcctgtcaagaattctaatggatacttctataatagtaacgattataagaaagagggcgcgaagtatccgaaggacgcagacgccaatggggcctacaatatagcccgaaaggtgctctgggcaatagaacagttcaaaatggccgacgaagataagctggataagacaaaaattagcatcaagaatcaggagtggcttgagtatgctcagacacactgcgaaaaacgtccggcagcgactaagaaggcggggcaagctaagaagaaaaagggtagcggacctgctgccaagagggtcaagttggacggcagcggcctcgagcaccaccaccaccaccactga

SEQ ID NO: 798 - DNA, 4122 bp, synthetic construct
  misc_feature 1..4122: note = Sequence codon optimized for human expression
  source 1..4122: mol_type = other DNA
atggaacacagtctgcgggatttcaccggcctatattccttgtctgaaaccctgtctttcgagctccgtcccctggactccgagttcaaccccaagccggctgatcgggccctagctgatatgaaaaaatatctggatgaagatagaaaacgagcggcacagtatgcctctattaaagccatcttggacgaagagcacaaaaagctgatcgagagggtgctttcagacgtgcctggagccataggacgattaaaaaaccgaaaggcattcgccgagatcctgagtgacgatggatctgggatcaggtggtcccgcctgaaagaagccgaaggggcagctaggaacgcaaagacggaaatcagggaggctaaaaagactagaaaggctacgtcagaggcggacggagcaattaccacagaaactaaggaggaagcgaggtttaaagatctgcagaaaaagttcagagagttgatagctgccctgctggacacggatgagaagaaaaaatctctcctggaggctaccccgtcgaagtatatcaaaggcatgctcagcgaatttggtgatgcccttcagcctgacaccagagaggctctgaataccttcgagaagtttgcctgttacctcaagggctttcaagagaacagggctaacctctatgcagccgagccacaagtcaccgcagtggccaaccgggtggtgaatcagaacttcccaaagttcctcactgcgtgcaggatcatggcacatattcaggaacgctacccagaaatcatcagcgaagccgagaggaaccttgccgcgaatctcaatggcgcgccgctaatgtccagatttcagcccgacgcattcgacttgtgtctggctcagagcggaatcgatgtgtacaacaccatcctgggtggattcaccctgaaagacggcaccaaaatccagggaatcaatgagacaatcaatctctataggcagcagcacgccgatgctgcaaacgacaggaatctcgctcccatacccgcactgtacaaacaaatattgagcgaccgagacactctctctttcatccccgaaatgttcgactccgacagagctgtgtgcgacagcattttgaagttcctagaaagtttaaagtgggagacgatgcaaagtgacataacttccctcctggactccctggacgctgatgacccaggggtgttcgtcgagaagagcgaactgaccaggatcagccataagttgttcggcgattggtcccgcatcagggccgctctcgaacgctgtgccgaaactaagttcactaggaaggcagatagggaaaagtggcttaataaagacatctactcattgagagagctgaacgagctcgacttcaaactctctgaggaagacgatatcgctgaagtgccggcgattacagatttttggcgtggcgcccatcgagctgaggtgtttagcgccgtcgagtccgccatccaagctgttcttgacacactccattccgaagcataccctgagggcgacactgaaccacgactaagggagaacgagaatgacgtggctgcaattaaggacctgctcgacgcacttactggcctcctgcacctcctgaagcctctgcaggcagaaagtcctgacgctaatatggtcttctatgccgattttaatgacttctacgccaggctggatccagtcatccctctatacaatcgggtacgcaactacattacccagaagcctagcgagcagaagaaggtgaaactgatgtttaactgcagcaccctggcagacggctgggatcggaacaaagaatcagataacaatgccgtcattctactgaaggacggaaattattatttagccgtgattcaacctgcccagaagcagacagacgggaaacgggaaagaaaggtcaaatttgccgattttgagactgacggtgccgggccttgctttagaaaaatggtgtacaaatacctccccggcccaaacaagatgctgcctaaggtcattttctctaaatccaatagagatatcttcgatcctcccgcagaactgttacgcaaatatgaggccggtatgcataagaagacgtcccccaattttgatctgaagttttgtcgcgagctgattgacttcttcaaagtctgcattgcgaagcacgaagattggtctaagtttggatttcagtttgctgacacagccaagtataacggcatcgatgagttctacaacgagatcagcgctcagggttacaaaatgaccttcgctcccatacccgtccagactgtttcagaccttatcagggacaacaaaattctgttgttccagatttataataaggatttcgcccctggcagtactggcagacagaataaattcacattatactggaagacacttttcgaggaagaaaacttaaaggacgtcgttttcaagctcaatggcgaggccgagctgttcctgcgtgatccatcagtaagaaaaccgttcgtccatcggaaaggtgataaacttgtgaaccggaccacaaaagatggagcgccagtgagcgagtcggtccatgcagaactttgcaaattcgccaacggcaggataggctacgacggcctctccgctgaggcccgcggaatttgggacaatggtcaagcggttgtgaaaacagctacacatgacattacaaaagaccgtcggtttacaaccccaaaattcctgtttcacgtacccatatccatcaacttcaaggcccctgatgccaaggcgggcatcaaccaaaaggttcttgattacctgagagacaaccccggggttaaggtcatcggaattgaccgcggagagcgaaacctcgtgtacttaagcctgatagggcgcaacgggagaattcttctgcaaaagtcatttaataccgtgccccagagacgcagtgaccggacagttgaatttgactatcacgcaaaactggatcagcgggaaaaggagcgggacgctgcgcgcaaaaactggacatcagtgaatcggataaaagacttgaaggcagggtacctctcacaaattgtgcacgagattgccaagttgatggttgagcacaatgccgtcgtggtaatggaggacctgaacttcgggtttaagcgagggagatttgctatcgagaagcaggtttaccagaatttcgaacgggcccttatcactaagttgaattacctcgtgtttaaggacgctgagacacccgccgacgccggatatgttctgaaggggctgcagctcgccaacaagttcgagagttttgaaaagttgggaaagcaaagcggcttcttattctacgtgccggccggttacaccagcaaaatcgatccagccaccgggtttgtatctttatttcagttcgggaagtatacatctgcagaggctcgtaaagcctttctgggtaagttccgctctatccgatttgacgcagcccgggatgccttcgcatttacattcgactatcgagattttcccgcccagggcaaggagctgcccggcaagagtgagtggacggtgcgttcagtaggtgagagaattgtgtacagcccaaagaagcgcgaatcgtttgtgtgtaaaccaactgaaataatcttggatgcgttggccaaacggggaattagaccagaggacgggtttgacttgctacggctaatcagggaaacggatggagccgatcgcgccaatgcagcgttttttaacgctgtattcgaggcatttaagcttaccgttcagatgagaaactccgatgccaaaataggggaggattatattctgagcccagtgatgagcgcagatggtaccttctttgatagtcgcaaggctcctgccgatatgcctcgtgatgcagatgctaatggcgcttatcacattgctatgaaggggctttacctgctgcagaaccggtttactgcaggcaccaaaaaagcagatctgaaaatttctaatcaggactggtttgatttcattcagaatcggcacgcccgcaaacgtccggcagcgactaagaaggcggggcaagctaagaagaaaaagggtagcggacctgctgccaagagggtcaagttggacggcagcggcctcgagcaccaccaccaccaccactga

SEQ ID NO: 799 - DNA, 3858 bp, synthetic construct
  misc_feature 1..3858: note = Sequence codon optimized for human expression
  source 1..3858: mol_type = other DNA
atgaagcagttcaccaacctttaccctgttagtaaaaccctgaggtttgagctgcaaccagtgggcaaaacaaaagagaatattgaaaaaaatggaatcttactgcgggatgagcaacgcgccgaggattataagcgggttaagctcctgattgacgagtaccacaagcagtttatcaaacaacggctgtggaactttaagcttccaatgatcaacaatggtcatcatgactccctcgaagaatatcaggccttatatgaattgtctaagagagacgacgatcaggaggccactttcacagaagtaaaggacaatctgcggagcatcatcgctaagcagctaaccgtgggatctacctatgaaaggatttttaaaaaggagttggtgcgcgaagatctgattgaattcctggaagatgagaaagataaggaaatcgtccgccagttcgccgacttcaccacctacttcagcgggtttcatgagaaccgcaaaaatatgtattctgccgaagagaaaagtacggcaattgcttacaggctcattcaccagaaccttcctaaatttatggataacatgaaggcatttgctaaaattaagcagaccagcgtggctgagcactttactgatatctatgagggatggaaggaatatctgaatgtggaaagcctggaagagattttctctctcgactatttttcagaaacacttacccagccccacatcgaggtctacaattacatcatcggtaagaagatcctagacgatggaaccgagattaagggaattaatgagtacgtgaacttatataaccagcagcaaaaagacaaatcacagcgtctgccgtttttggtgcctctgtataaacaaatattgtccgaccgcgagaaactttcttggctaagcgaggagtttgactccgacgagaagatgcttgcggcgatcaaggaatcctacaaccagctgcatgacctcctgatgggcgaggagaatgagagcttacgatccctgctgtcccatattaaggattatgacctcactcagatcaacatcacaaacgaccttagcctaaccgaaataagtcagcacttgttcggccattacgacgtcttcagcaatggcattaaagaccagttgagaataatcacacctcgcaagaagaaagaaagtgatgagaactttgaggaccggatcagtaaaatctttaaaacacaaaaaagcttctcgattgacttcttagataagctgcctcagcctatcatggaggatggcaagccaagatgcattgaagactactttatggcactaggggccatcaatacaaatacaactcagaaggaaaacctgtttgcccagatagagaatgcctatgaagatgctcgggcaatcctgcagatgaaggagacaggagacaccctttcccagaacaagtcggccgtcgcaaaaatcaaggcactgctggataccttgaaggatttgcagcactttattaagccactgctgggaagcggggaagagcaggaaaaagatgagctgttctacggctcgtttcagatgatgtgggatgagctcgacgcaattacgccactgtataataaagttcgaaactggcttacgaggaaacccttttctactgagaagataaagctgaacttcgacaacgcccagctcctagctggctgggacctgaataaagaaattgacaacacctgtacaatactgagaaaggatggtctgtacttcctcgctatcatcaataaacagcacaacagggtccttaccactgataaccttatctctgatggcgactgttacgagaaaatggtttacaagcaactcggacaaatctcacagcaactgcctcgaattgccttctccaatagttggcagcagaagattactattccagccgacgtgatgcgtataaagaaaactggcagctttaaaactaataatgacgatctacaaaaactgatagcgttctataagtacttcatttcccaacacaaagaatggaacagtttttttaacatcaggttcaccgagagggataattacaaaaacctgccagacttctattccgaggtagatactctgttctactctttgtctttcctgaaagttagcgttgactatattaaccagcttgttgatgagggcaaactttatttgtttcgcatctggaacaaggatttttctgaattctcaaaggggacccccaacctccatacgctgtactggaagatgctgtttgatgagcggaacctagctgatgtggtgtataagctgaatggtcaggctgaagtgttctaccgcaaggtcagcatcaaacccgaaaaccgaatagtacaccaggcccaccggcccataacaaacaaaaacgagctcaatgaaaagcgcacttcaaccttcgagtacgatatcataaaggaccgaagatatactgtggacaagttccaattccatgtcccaatcaccattaattttaaagctaaagggcagaacaatatcaatcccatagtccaagaaaccattagacaggacggcttcaagcacattatcggaatcgatcggggcgagaggcatctgctctacctgtccctgatcgatttgaacgggaacatagtgaagcagatgacgctcaacgacatcattaatgaatacaaagggcagacttacaagacaaactaccatcatctgctcgccaaaagagaaggggagagaacagacgctcgaaggagttgggatactattgagactattaaggaattgaaggaaggttatttaagtcaggtaatccacatcatctccaagatgatggtagagtacagcgctatcgtggtgctcgaagaccttaacattggctttatgcgcggaagacagaagatcgagcgtcaagtgtacgagaagttcgaaaaaatgctgatcgacaaactcaattgctttatagacaagcagatcgccccccaggaggtgggtggcatgttacacccgatacagctcacaaataagtttgaaagcttcggtaaactcggcaagcagagcggatgtctcttctacatccctgcatggaatacatctaaaattgaccccgtcactgggttcgtgaatcttttcgatacccattatgagactagagaaaaagcacggttatttttctctaagtttcagcgtattaacttcaatgaggagaaggggtggttcgagttcgcgtttgactacaatgatttcaccaccaaggccgaggggacgcgcacacaatggacgctctgcacctacggggaaaggattagaacgttccggaatccggataataaccaccaatgggacgatgaaaggattgagctgacagaggagtttaagcagttgttcgagaagtacgacattaacatcagaggtaacctcaaggaggccatttccaatcagagtgacgcacaattttatagagatctgctgggattgatgaaactactcctccagatgaggaactcaataaccaattcagaggaggactatctgctgtcaccagtcgccgatgagaatggccacttcttcgactcacgggaagagatcgagtccttgcccaacaacgcggatgcaaatggcgcgtataacattgcccgaaagggactgtggatcatggaacaaataaagaaaacagacaaccttgccaagttaaaactcacaatctcaaacaaggaatggctgcactttgcacagaataaaccctacctgaatgaaaaacgtccggcagcgactaagaaggcggggcaagctaagaagaaaaagggtagcggacctgctgccaagagggtcaagttggacggcagcggcctcgagcaccaccaccaccaccactga

SEQ ID NO: 800 - DNA, 3945 bp, synthetic construct
  misc_feature 1..3945: note = Sequence codon optimized for human expression
  source 1..3945: mol_type = other DNA
atgaagaaggagaacatctttgagaatttcacacaccagtacagccttagcaaaacacttcgcttcgagctgatcccaaccgaggaaacaaagcggttcctcgaaaagaatgagatcattaagaaggacgccgtgatcgatgaatcgtaccataaagcgaagccttactttgacagcctgcatagggagtttattaaggaaagtctcgatcccgaacgaagcttgctttccttcggaaactttgagcggagctggaacgactttcaaaaagataagaagtcaaacaaaaagaatctgctggcacagaaaaagctcctctacaaagacatcgcgaagctgttcgacgactacgtgaatacttggaaaaagcagtacgctccagagactaagaattctggcacgaaactgttgtactcggccgatacactgtcgattctcaaaaagcggtttccaaaagatagcgaaaacgagaagttattcatcaaagatgaacatgggaatgataggtacatctttgattctttcgaccgttttacgacttatttgaccaagtttcaagcaacccgagaaaacctgtacaagaatgatggcacaagcactgccgtggcgactagaatcgttgagaatctgtcattctttctggctaataagagcaagttcgaaaaatttctcgcgtacaaagatatcttaaagctgactgaccaggagaaagagtcctcaaagactgaatactacatgcgatgcatgactcagcccggaatcgagaaatataatgccttggtcggcgatctcaatgcacggatgaaaaccctgcgcgacactgccgggaaggacgctaagaaatctgactatcctcttcttaagaagctgtataatcagatcctggcggagaagaagatagaatccgataaggtttttgatatcgagtccaacgaagaagttcccgttaggatgcacgagttttatgaagaggtcgaacgagtgtcaacaatcgcaaaagagctggttaccatcttagcccagggcggcttcgaaaacgaatatggtggcatctacttgcataacagagcaataaacaccattgctcgcaagtggttcgtgtcagcctatgaattcgagaactgcctgcctcaaaaggggaaaaagaaggaagggtctgtgcgagtggcaccattcgtgtcctttgctgagattaaggacgctctgggcgagaagctggccgaggatctgctgaaggaaaaattattcgaagagaaggcctatcgtctagtaaaacggacccttgcctatagccagtttctggctctgtttgcaaaagacctagaaatcttacttaacgagtacaacgaaaaaaagaataattttagtaaaaaggatctccgcattttcgagaggggggaaaacgatgagaacgtggatgccctcaaggacgcactagacgctggcctgcatattgttcaatttatgaaatactttgtactatcttccaagaaagccgatgacaagcccacccacacgagtgctgaattttataaccactacgacgaactttatggagatcccgaccagaaacatgacatcgtgaggtactatgacgccttccgcaattttctcaccaaaaagccggcagatcagaaaaagatcaagctgaatttcgagaacggtgcattgctgacgggctttgacaaggacaaggagtcagagaaactggggatcattctccggaaaaatagtatatattacttaggcattattaacaaggaacacaataaaatcttcgacgataaaaaacatcaagacgctttcgacgtcgtggatgccacttcctatgagaaaatggagtacaaactgttccctgatcctaaaaggatggtgcccaagattgcatttgccaagaaaaatcgggaaagattcggatggacacaagagatccaggacattaaggatgagtatgcaagattccaggacgatcgcggagatagaagtaactggtccaagcagtttgataagattaagcttactaagttgatagcctactaccaacacgctctggatcgcggtggttacaaaaacacatttgatttccaatggaacaaccccgtggactacagcggaattggcgagttcaacgatcacttgacctcccagaattacaaaatcgggttcaggcaggtgcggcagcggtacatcgatgataaagtcgcacagggtgagctctatctgttcaaaattcacaacaaggatttcggggagaagtctaagggaacccagaatacccacactctgtacttcttaaatctgttttcccagcacaacctcacccacatcaaactgagactcgctgggaatgccgaggtcttctaccggaagagcagcacgcagagaaaggaagagcaacgcaaattcatcaggccaatcgtcaagaataaaagattcacagaggacaaatactttttccacatccctatcaaaattggagcctccgtgaattctatctccgaaaccaagtttaatagaaccctgaacgagaaactcaggcagagcgcttgtctgatcatcggcattgacagaggagagaagcatttggcgtattattccgtaattaaccagaaaggcgaaattgtggatcaggccagtctgaacaagataaacgacgtggactactgtgagaagctccgcacccgagagaaggagcgtctggaacagcgaaaaagttggaaagcaatctctcagatcaaagacctcaagcgtgggtatatatcacaggttatccacaaactgagcgagctagtgattaagcataacgcgatcatagttttcgaagacctgaatatgaggttcaaagaggtgcggggaggaatcgaaagaagcgcttatcagcagttggagaaggccttgatagagaaatttgggtatctagtattcaaagataaggaccctctagaagctggaggtgtgctgaacgggtatcaactcagtgccccctttgagtcatttgagaaaatgggcaaacaaaacggagtcattttctacacaaatcccgaatacacaagtactaccgatcccgtcaccggctggagacagcacatatacatcaagagcgatgccacagataatgaggccctcaaagtattcacggaaaagatagggataggttggagcgatgacaagcagagctacactttttcctatgaccaaaaggacttctgggaggatagtcctgcacgcaagtgggtcttgtacgccaatgcgcctaggctggagaggtaccgcaacgacgctggctattggacaacacgagaaacaaattccaacgacctcttgagagaattattcgaggtttgggatttcgaccaaccggagggcgatatcagcgaacagatagccatgatgtacgaagagggcaagcttaagggggagaagattatttctgagaaaagtcaacgtttctttaaggccctgaggtatgcccttaatctgacgcagcagattcggaactcagactcgatccggtatgtctatgaaagagacgcacagggagacatagtggaggactctcagggcaagatggtcgtgaaagagattggtgagaacgtggactttatagcttcaccagtcgtgccatttttcaccaccccgaatccatataccaaggaaaacctttgcgggctcgtaattgagaatggagacgccaacggcgcatataacattgctcgcaagggtattatgatgctagaaaggatcaaacagacacaggccaatccagatctgtacatttcaaaatccgactgggacgaatggcttatgaaagacattaagcagaagaaacgtccggcagcgactaagaaggcggggcaagctaagaagaaaaagggtagcggacctgctgccaagagggtcaagttggacggcagcggcctcgagcaccaccaccaccaccactga

SEQ ID NO: 801 - DNA, 3891 bp, synthetic construct
  misc_feature 1..3891: note = Sequence codon optimized for human expression
  source 1..3891: mol_type = other DNA
atgaatgacttgaaaaccttcatcggtatctatcccgtgtcgaagacactcaggtttgagttacggcctatcggaaagacacaggaatggatcgagaagaataaggtcttggagtccgacgagcagaagtccgccgactaccccaaggtaaaagctctgattgacgagtaccacaaagtgtgcatccacgaatccctgaaagacgtgtcattcgactgggccccactgaaaaatgccttaggtgagtatcagaaagagaagagcgatgaatctaagagcgtgctcgatagagaacaaactaacatgcgcaaaaaggtggctgctgctattaaatcgtttcaacattatgagcagcttactgccccgactccacaaaaattaatcgacgacgtcttccccggaagatacgaatcggaggcactgaagtctttcaaaagattcgcgatttattttcgtgggtttcaagaaaaccggaacaacatctattctgccgacgcaatctccacaggcgtgccctaccgcctggttcacgagaactttccaaagtttatcacgaacatcgaggtgtacaacaatatcaaagccaattgtcccgaggtgatcgaacaggtcgagacagagttgcagcctttcctgaaagaaatcaggatagaatcaatttttaacttggactattacaattcactcctgacccaggacgggattgatttctataaccaggtccttggaggagtggcagaagagggaaaacaaaagtaccgggggattaatgagttttctaatctatatcgtcagcagcacccggaaatggcaggaaagaaaaaagccctgactatgatacctctgttcaaacagatcctttccgaccgggagacactgtcttacattccccagcaaatcgaatccgagaggcagctcgtgagtatgctcaaacaattccacagccacattctgaactacgagtataatggaaatagcgtgaacgtgctgagagccctgtcccgtatgatctccaaagttgacgaatacaaccccgaaggtatctacatagcagccaaagctctcaccgatatatcacaggttctgtatggcaagtggagcgtgctcagcgacaaactgtacgatagtgccgtcaagaagtatggcgaaccaagtactgccaagaataaaaagaagattgacgcctacgtcagcaaagaggcgtattcactcagtgaggtcgggctcattggggatgtggggctgtctagctatttctcctcagtatcacagtcaattgagcaagtagatgagaagtgggcgcggttcattaggtggtgcgataatgacgaagagcagctattcttaaataaccctgagggtacagagctagtacgcgcccttctggatagctatatggatatcctgcaccgctgtggggtattggtagtgagcgtggaaaatgatctggacaaagatttctacaacgatttttttccgatatatgcagaactagagaatgttattatcatatacaacagagtccgcaattatctcacaatgaagccctatgataccaagcaatttaagttgaatttcggcgtcccaaccctgggcgatggctgggatcagaacaaagaaaaggacaacaaaaccattcttcttttcaagggcggtctatcctacctaggcatcatgaacccgtacaatacccccaagataaaggaatgtaaggtggactccgaggatacttactcaaagatggtgtataagctgctccccgggcctaacaagatgctccccaaggtgttcttttctaagaaagggctgcagtcttttagtccaagcgagcatatccaagaaatttataggaacggttcctttaaaaaggggagcccagatttcaatcatgagcgactccacgaattaattgatttctacaaggacagtatcagcaagcatcccgactggtcaaagtttgactttaagttcagtcccactaagtcttatgaggacattagcgccttctacgatgaaatctccaaacagggctacaaaatccaatttataaacatatcagagcagcaggtcaatgaatgggttgccaatggacagctctacctgttccaactgtacaataaggactacgctgagggcgcacatgggagaaaaaacctgcacaccctctattgggaaaacctttttacacctgagaaccttaacaaccttgtgctgaaactgaatgggcaggctgagctcttttaccgacctagtagcatcaaaacgcctgttaagcatgtggtgggctcgaaaatgttgaacaggcgggataaaagtggtatgcctatccccgaaacagtttacaagtctctgtaccagtacttcaacggtaaaaagctgaaatccgagctgaccgccgatgaaattgcctatattgatcagatcgtggtgaaagacgtcacccacgaaatcatcaaggacagacgatacacaaaacctgaatatttttttcacgtgccaattaccttcaacgcgaatgcagaaggtaatgaatacataaatgagaaggtcttggactatattaaagacaacccagacgtaaatattattggaatcgaccggggagagcggcatcttatatatctgacgttgattaaccaacgcggagagattcttaagcagaaaactttcaatctggtcggcaattacaactaccatgccaagctggagcagcgagagaaggaaagggacgctgccagaaagtcctggcagagtataggaaagatcaaggacctgaaagaggggtttctatctgcagtaattcacgaaatagctgtcatgatgatcgagaacaatgctatcgtggttctggaagatctcaactctggctttaagagggggaggtttaaggtggagcgccaggtgtatcagaaattcgaaaaaatgctgatcgacaagctgaactacctctccttcaaggattgcaaggcagacgaagtgggtggcattttacggggctaccagctcgcacagaagtttaccagctttcagaagttgggaaagcagtctggctttttgttctatatcccagctgcctatacaagcaaaattgatcctgttactgggtttgtgaatcatttcaactttaatgacgtaaccaacgcggagaaacgcaagagtttcttcatgaacatgaatcggattgaaatgaaaaatggcgacatagaattcgagttcgattacagaaaattcaagacctaccagagcgattacaggaacgtgtggacggtcaacactagtggaaagcgcattgtgtttgacgcagagaagagacagtccaaggattattacccaacgaaggagatcgtcgccgctttcaaggacaaggatataatcctgaaagacggcatgaacgttaaaagcttaatcgcgaatattgaagcaaatgctcgtaacgcttctttttttggatctttgttctacgctttccagaaaacactgcagatgcgaaactcaaacgctaccaccgaggaggattatatcctgtccccagttgtccacaatggcaagcagttctgcactatcgatgaggtgaacaagggcaaaaatgcggaggggaattggatcagcaagcttccggtcgacgccgatgccaatggagcctatcacatagcactgaaaggcctctacttattgatgaacccacaaacaaagaagatcgagaatgaaaaatggtttaagttcatggtggagaaaccttacattgagcttaaaaatatcgataacttcgttaaacgtccggcagcgactaagaaggcggggcaagctaagaagaaaaagggtagcggacctgctgccaagagggtcaagttggacggcagcggcctcgagcaccaccaccaccaccactga

SEQ ID NO: 802 - DNA, 3903 bp, synthetic construct
  misc_feature 1..3903: note = Sequence codon optimized for human expression
  source 1..3903: mol_type = other DNA
atgaacacatcactattctcatcttttactaggcagtacccggtgacaaagacccttagatttgaattaaaaccgatgggcgcgaccctcgggcatattcagcagaaagggttcctccacaaggacgaggagctcgccaaaatatacaagaaaattaaggagttgctggacgaatatcatagggcttttatagccgacacactgggtgacgctcagctggtcgggctagatgatttctacgcggattaccaggcacttaaacaggacagcaagaattcacacctaaaggataaattaactaagacccaagataacctcaggaagcaaattaccaaaaattttgaaaagacgccccaattaaaggaaaggtataaacgcctctttaccaaggaactgttcaaagcgggtaaggataaaggagatctcgaaaagtggctgattaaccatgatagtgaacctaacaaagccgagaagatatcgtggatccaccagttcgagaactttaccacctattttcagggattttacgagaaccgtaagaacatgtattcggacgaggttaaacacacagcaatagcttatcggctgatccacgagaacctgccaaggttcgttgacaacatccaagtcctttctaaaatcaagtctgattaccccgatttgtaccacgaactgaatcaccttgactctagaactatcgatttcgcagacttcaaatttgacgatatgctccaaatggatttctatcatcatctgctgatccagagcggtatcacggcatacaatactttgctgggaggcaaagtgctggagggcggcaagaagctgcaggggattaatgaactcatcaatttgtacggacaaaaacataagatcaagatcgccaaactaaaaccactgcataaacagatcctgagcgacgggcagagcgtgtccttcctcccaaaaaaatttgacaatgactatgaactttgccagacggtcaatcatttttatagggaatacgtagcaatttttgatgagctggttgtgctgtttcagaagttttatgactacgacaaggacaatatttatataaaccatcagcagctcaatcagttaagccatgaactatttgctgattttcgcctactgagtcgggctctggacttctattactgccaaattatcgatggagacttcaacaacaaaattaataatgcaaagtctcaaaatgcaaaggagaagttactgaaggagaaggaacgctacaccaagtccaaccattcaatcaacgaattacagaaggccatcaaccactatgctagccatcacgaggacactgaagtgaaagttatctccgactatttcagtgcgactaacattcggaatatgatcgacggaattcaccatcacttttccacgatcaaaggcttcctggagaaggataataaccagggtgagagctaccttcctaaacagaagaatagcaatgatgtgaagaacctcaagctgttcctggacggagtactccgccttattcattttataaaaccattagctttgaagtcagatgatactcttgagaaggaagaacacttctatggcgagtttatgccactgtacgacaaactagtaatgtttactctcctgtataacaaggtgcgtgactatatcagtcagaaaccatataacgacgaaaagataaagctgaatttcggcaatagtaccctgctgaacggctgggatgttaacaaggagaaggataactttggggtgatcttgtgtaaagaaggcttatattatcttgccattctcgacaaaagtcataaaaaagttttcgataacgcccccaaggccacatcctcccatacataccagaagatggtgtacaagctgctgcccgggccaaacaaaatgctccccaaggtgttctttgcaaaaagcaacatcggctattatcaaccctctgctcagctgctggagaactacgagaaggggacccataaaaagggatcaaacttcagcctaaccgattgccatcacctcatcgacttcttcaagagctcgatcgctaaacaccctgagtggaaggagttcgggttcagattttccgacactcacacatatcaggacttgagcgacttctataaggagattgaacctcagtcatacaaagtaaagtttatcgacatcgatgcagattacatcgacgacctcgtggagaaggggcagctttacctgtttcagctgtacaataaggactttagcaagcaatcttacggtaagcctaaccttcacacactgtatttcaagagcctattttctgatgataatcttaagaaccctatctataagttaaatggagaggcggagattttctaccgacgggccagcttgagcgtctccgataccacaatccaccaggccggagagatccttacacctaagaaccccaacaatacccacaatcgcactttgtcctacgacgtcataaagaacaaacggtacaccacggacaaatttttcctccacattcccattaccatgaacttcgggattgagaatactgggttcaaggcatttaaccaccaagttaatacgacactgaagaatgccgacaaaaaagacgtgcacatcatcggcatagatcgaggcgagcgacacctgctctacgtgtctgttatagacggcgatgggcggatcgtcgagcagagaaccctgaatgatattgtcagtatatcgaacaacggcatgtctatgtcaaccccctaccaccagatactggataatcgagagaaggaacggttggccgccagaaccgactggggagatattaagaatatcaaggaattgaaagccggctatctcagccacgtggtgcacgaggtcgtacagatgatgctgaagtacaatgctatgatcgtgctggaggacctgaattttggctttaaacacggccgctttaaggttgaaaagcaggtctaccagaattttgaaaatgcccttatcaagaaactgaactacttagtcctcaagaacgctgataatcaccagctgggctccgtgagaaaggcactgcagctcacaaacaattttaccgacattaaatctattggaaaacagacgggttttatcttctacgtccctgcctggaacactagcaagattgacccgacaactggcttcgtggatctgttgaaaccacgttacgagaacatggcccaagcccagagtttcatttcaaggttcaaaaaaatcgcctacaatcatcagttggattacttcgaattcgaattcgattacgctgacttttatcaaaagacaattgacaaaaagcgcatttggactttgtgtacctacggtgatgtgagatattattacgaccacaagacaaaggagacaaaaaccgtgaacatcaccaaggagttgaagtccctgctggataaacacgacctgagttatcagaacgggcacaatctggtggatgagctagccaattcccatgacaaaagtcttctctccggtgtcatgtaccttctgaaagtgctgctcgcattgagatattcccacgcgcagaaaaatgaggacttcattctcagcccagtaatgaacaaagacggagtgttcttcgattcccggttcgcagacgatgtcctccccaataatgctgatgctaatggtgcttaccatattgccttgaaaggactctgggtgctgaaccaaatacagtcagccgacaacatggataaaatagacctgtccatctcaaacgaacagtggcttcatttcacacaaagtaggaaacgtccggcagcgactaagaaggcggggcaagctaagaagaaaaagggtagcggacctgctgccaagagggtcaagttggacggcagcggcctcgagcaccaccaccaccaccactga

SEQ ID NO: 803 - DNA, 3972 bp, synthetic construct
  misc_feature 1..3972: note = Sequence codon optimized for human expression
  source 1..3972: mol_type = other DNA
atgaaggatttcacccaccaatattccctaagcaagactctccggtttgagctgaagccagtgggggaaacagcagagcggatcgaggattttaagaatcagggcctcaagagcattgtcgaggaggatagacagcgagcggaggactacaagaagatgaagagaatcctagatgactaccataaggaatttattgaggaggtgttaaatgatgacatttttactgccaatgaaatggagagtgcatttgaggtgtaccgaaaatatatggcctcgaagaatgacgacaaacttaagaaagagatcaccgagattttcacggaccttcggaaaaagattgcgaaggccttcgaaaacaagtctaaagagtactgtctgtataagggagacttcagcaaacttatcaacgagaagaaaacagggaaggataaaggccccgggaagctctggtactggttaaaagccaaagccgatgctggtgtgaatgagttcggtgatgggcagaccttcgaacaggcagaagaagcgctggccaaattcaacaatttttctacctacttcacgggctttaatcagaaccgggacaacatttacaccgatgcagaacagcaaacagccattagctaccgagtaattaatgaaaatatgaccaggtactttgacaattgtatcagatatagtagcatcgagaataaataccctgaattggttaaacagctcgaacctctgtcaggtaagttcgcgcctgggaattacaaggactacttaagccagaccgctatagacatctataacgaggctgttggacacaagagcgatgacatcaatgcaaaaggcatcaaccaatttattaacgaatatcgtcaaaggaactcaattaaaggccgagagctgcccatcatgagcgtgttgtataagcagatactttctgatatcaataaggacctcatcatagacaagttcgagaacgcaggcgagctgctcgacgccgtcaagaccctgcaccgcgagttgacagataaaaagatcctcttaaagattaagcagacacttaatgaatttctcactgaggacaattccgaagacatctacattaagagcggaacagatctgaccgctgtcagcaacgctatctggggcgaatggagcgtcatccccaaagccttggaaatgtacgcggagaacatcaccgacatgaacgccaaagcgcgtgagaaatggctgaaacgggaagcataccacctgaagacggtgcaggaggcaatcgaagcttacctcaaggataacgaggaatttgaaacgcgcaacatttccgagtattttaccaatttcaaatccggtgaaaatgacttgatccaggtggtgcaatcagcgtatgccaaaatggagtctatctttgggatcgaggattttcacaaggatcggcggccagtcacagagtcaggggaaccaggcgagggcttcagacaggttgaactggtacgtgagtacctcgacagtctgatcaacgtggagcacttcataaagcccctccacatgttcaggtctggaaaaccaatcgagctggaggactgcaacagcaacttctacgacccacttaacgaggcgtataaagaactggatgtggtgttcgggatctataataaagtccgcaattacgtgacccagaaaccgtactccaaggacaagtttaaaattaattttcagaacagtactttgctcgacggatgggatgtgaataaagagagtgccaatagttctgtcctgttactgaagaacggaaagtactatttaggagtgatgaagcaaggagctagcaacattttgaattaccgccccgaaccttcagattccaagaacaagataaacgcaaagaaacagctctcggagattgctttggcaggagctactgatgactattacgaaaagatgatatacaagctgctgcctgacccagccaaaatgctaccgaaggtgttctttagcgcaaagaatattgaattttacaacccaagccaggagatcatctacattagggagaacgggctcttcaagaaagacgccggggacaaggaatctcttaaaaagtggatcggcttcatgaagacctccctactaaagcacccggaatggggctcttacttcaacttcgagttcgagcctgcagaggattaccaggatatttctattttttataaacaagtcgccgagcaagggtattcagtgacattcgacaaaatcaagacttcctacatcgaggaaaaggttgcttcaggcgaactgtacctgtttgagatctataacaaggacttctcccctcacagcaaaggacggcccaacctgcatacaatgtattggaagagtctatttgagaaggaaaaccttcaaaatcttgtgacaaaattgaatggggaagccgaggtctttttccggcagcactccatcaagcggaacgaaaaagtagtgcatagagcaaataggccaatccagaataagaaccccctgaccgaaaagaagcagtccatatttgagtatgatcttgtcaaagataggagattcaccaaggacaagttcttcctgcattgccccattacgctcaattttaaagaagctggtcctggacgctttaacgataaggtaaacaaatatattgccgggaatcctgatatccgcataataggtattgataggggagagaggcacctgctgtattattcccttatagatcagtcggggagaattgttgaacaaggcactctgaatcagatcacatcaacactgaacagcggcggacgagagataccgaaaactaccgactatcgcgggctgctcgacaccaaggagaaggagcgagacaaagctagaaaatcctggagcatgatagagaatatcaaggagctcaagagcggctacttgagtcacatcgtgcataagctggccaaattgatggtaaagaataatgctgttgtcgtgctagaggatctgaacttcggcttcaaacgtggccgcttcaaggtggaaaagcaagtctaccagaaattcgaaaaagccctgatcgaaaagctgaactacctggttttcaaggatgctcggccagcagaacccggccactacctgaatgcttaccagctgactgcacctttagaatcattcaagaaactgggtaagcagagtggttttatctattatgtgcccgcctggaatacatccaagattgacccagttactggcttcgtaaaccagttctatattgagaagaactctatgcagtacttgaagaatttttttggtaaattcgactctatcagatttaatcccgacaaaaactatttcgaatttggtttcgactataaaaattttcataacaaggccgccaaatcgaaatggacaatttgcacccacggcgacaaaaggagttggtataacaggaagcagcgcaaattagagatacataacgttactgagaacctcgcctcactgctctccggaaagggaattaactttgccgatggaggatccatcaaagataagatcttgtcagtcgacgatgcaagctttttcaaatctctcgcctttaacttcaaactgactgctcaacttagacataccttcgaggacaatggggaagagattgattgtatcattagtcccgtggctgctgccgatggcacgttcttttgctccgaaacagccaagaaactgaacatggaactgccacatgacgcagacgccaatggcgcttacaacattgccagaaaagggctcatggtgcttcgccagataagggagtcaggcaaacctaaacccataagtaacgctgattggctggattttgcccagcagaatgaggacaaacgtccggcagcgactaagaaggcggggcaagctaagaagaaaaagggtagcggacctgctgccaagagggtcaagttggacggcagcggcctcgagcaccaccaccaccaccactga

SEQ ID NO: 804 - DNA, 3732 bp, synthetic construct
  misc_feature 1..3732: note = Sequence codon optimized for human expression
  source 1..3732: mol_type = other DNA
atgaagcagagcacccagtacgacgattttactaatgtctattcccttagtaagaccctgagattcgagctgaaaccagatcctctaaccgcagagtatattgaaaaggaacagatgctggaaaaagacaagtccatctcccagagctaccaggagattaaggagtacttcgatcgcctccacagggatttcattaacgaggccctggccaaggttaacttggactgctcacactactgggaactttttcaggcgaaggataaaaaagcactgcagatcgaagccgacaagttgcgcaaaaatttcggcactgccttcaatttagtgggcaggcagtggtccaaactcgcagggatcaaggaggagaacgaggagaacgaaggcaataaggaccagagtaagtacagagatatactgttcaagaaagaagtgctggacattatcaaggcccggtatggacagggcgacgctcgtttggctgctctgctggaaacatttaaaaacttctttacttatttcataaatttcaacgagagcagaaagaacttctacaaactggacggaacctcaactgctatcgctaccagatcgatagacgtgaatctaaaaatcttttgcagcaacatcgcaaatgttcaatacctgcccgacggaattcagctgacagatgaggagagaagcctgtttgagattagaaactatcagaccttcctgcaacaggaaaagatcaaacaatataacgaccttatagggacaataaatgggaagatcaataattatagacaggctaatcatcagaagattggcttcttaaaaatcctgcagaaacagattctgggtgatgccaacaatccttcaaccaagttcattgagatcacagacgacgcctccgtgtttccggtcctgaatgagctcataaacaatgccgaggaaccattcagaaagttctataaggagctactccccaagatcctccctgatacaactgataatagtattgatctatcaaaggtgtatctgtctaaggtcgccctgaacaccatctcctcaaaggtgtgtcagagctggtgtacattaaaggatattctagaaaaaaagaatgactttagtttagacaacgtgctgacgagtctgaagaataatcaacagcaggccaaggagatctttcgggatgacgtgctgaagaacttcctggcagacagcaatgataaaatttttaagaaatggttgtataatgaataccagaaatcatacgagcgttactgcgccgcaaaagacgtacttttgtgtaaaatggagcaggacaagagcttccgaaaagaggaccaggagcagaagaatattattaaagagttttgcgacgctgctctagaagtttacaggatgatcaaatatttttatatcgataggagccaaaactctgtcgaagtggacccaatcttctataacatcctggatcctatcctagacgactgctcagtgtatcaatactataatgagatacgcaactacttaaccaaaaagcctttttctcaggataagatcaagctgaatttcggaaacgggcaactcttgcagggctgggacgaaaacaagctgaaagactataagggagcgatcctccgtcacggtgacgattactatttgggtatcttgatggggaatcaggtctttcagaccaacaacaaggaggcatacttagacaacacaaatggccacggctgggagctgatgatctacaaacagattgctgatgctcaaaaagatgtgcctaggttgttcttcgccaaagcaaatctcgcgctgtttcagccgtccgacaatattaaacggattaaggactccaaaagttacctgcggtcgtcagataacttttcaagccaggacctctatgatctcatagattactataagtcctgcattgaaaagtatcccaattggcagtgttacgactttcatttccttccaacggaagagtacaagaacatgaaggattttaccgacgatattcagagctgtgcttacaaagtcaagttcgtgcctgtgcgggaccagtacataaaagagcagcaaagtcagaagcagagccaaaaacagtctcaggtggggctcctcctttttaaaatcaccaacagagactttctcccccaagcccatggctgcgacaaccttcacacaaaatactttcgagcgctgttcgaccaagaaaatctgcaacatccggtaattaagctgaatggcggcgcagaaatattcttccgccaggcctccatcactcccaaacttgtcgagcgtggacagaagtgtatcattgagaatcgacgatacacggaagacaagtacctcttccacttcccaatcacacttaacgttaaccataagatcactccaagggcgtttcgggcaaaaatcaataatctgctctataccaaccccaatattaatatcatcggtatcgataggggcgaaaaccatctgctgtatatctctgtagtgaaccaaaaaggggagatcttagatggtccccgcccgctcgacactgtgaacggcatcgattatctcggactgttagaaaaagttagcaaggacagggaccgagctcgaaaaaactgggaatccatagccaagatcaaggacctgaaagcgggctacgtgggtcaagtagtcaaggtaatcgccgacttggccctccagtacaacgcaatcgtcgttctcgaagatctcaatacaggttttaagaggagcaggcagaaaatagagaagcaaatttaccagaactttgaactggccttgattaacaaactgaattattttgtgaaaaaagaggcaatgcctggagagaagggccacttcttgtccgctttccagttgaccgagccaattacttcctaccaagacgtcggcaaacagacagggatcattttctacgtgcccgccgattacacttcaattacctgtcctcagtgcggcttccacaagagtttcaacttttatcataagaacaagaccgaagatgaacacctcctgaagacaatggatctacggtatgacaatgatgatgaatgtttcaagctgacctgtaatctgatggcactgagcaataacaaaaagcaggataacaatgagctggagctgtccagcaaaaacatacagaggtggcgctgggggacaaacaagcgggagcttgttagctacgatattactaagtgccttgccgaacttttcagtaagttgcagatcaattacacgcaggaacgcggaaatctcctgaacctttttatcagtcagcagcccacaagccaggactacgatgccctcatattttatcttcaactctggcaaaagatccgcaactccagcccaactagccccgactacatacaatgcccacactgcggatttcacagcgacaatggattccgcggaaaagagtggaacggggatgctaacgggtcgtacaacattgccagaaaaggtatactgattttgggaaaaatcaaacagtttggggataaccatcacgatcgggatcaagagcatatttttgatgaccttaagtggagcgacttatctattaacacggaggagtggaacgaatatgtggggcggcagaaacgtccggcagcgactaagaaggcggggcaagctaagaagaaaaagggtagcggacctgctgccaagagggtcaagttggacggcagcggcctcgagcaccaccaccaccaccactga

SEQ ID NO: 805 - DNA, 4011 bp, synthetic construct
  misc_feature 1..4011: note = Sequence codon optimized for human expression
  source 1..4011: mol_type = other DNA
atgaatgcacagaagtcattcttcggagattttaccaatctttacagcttacaaaagacattaaggttcgaattagagccacaaggaaagacactagaacatatcgagaacaagggtctgatctcccaggacgagcagcgagccgaatcctacaaaaaaatgaagaaaactatcgatggtttccataagcactttatcgagatagccatgtctcaagtgaagttaacaaagctgaaggagtttgtcgacctgtacaacgccagcccggaaaggaagaaagaggatgggtttaaaaagtcttttgagaaggtgcagacggagttgaggaaagaaatcgcgatggggtttagggcaggagaggcgaaggagatattctcaaagattgacaaaaaagaactggttactgacctattagagaagtggatgcagacgcaggaagaagacctgtacttcgacgagagctttaagacttttactacatattttggggggtttcataaaaaccgtaagaacatgtacacagataaggaacagtccacatcgattgcctaccggctggtgcacgaaaaccttcctaagttcctggacaacatcaaggttttcgagcggataaaaagcattccagtgctctatgaaaagtgcaccacactttatactgaaatcaaggaacatcttgatatcaaagacattaatgaagccttcaatctgtattgctacaataaagtgcttacccaaaaacagatcgatgcttataatctcgtaatcgggggcatgaccgcccaggagggaaagaaaaagattcaaggcctgaacgagcacataaacctgtataatcagcgacaggacaagaaggaccggatccccaaactcaaacagctgtacaagcagatcctgagcgacagagaatcagttagctttctgccagaggcttttgaagatgacgagtctaagaccgcctcccagaaggttttgaacagcatcgaagagtattaccaggctaatcttgtcagtttccatccccgagataaggatgaagccgagaatgttctggagaagataaaagagctcctgaccagtcttaaagactacgatagtaataaaatttacctgagaaatgataaggcaatcaccgacatctcgaaggctctcttcggagattggggcatcatcaaagtggcgctggagtttgcatttctccagacactcaagatcggcgaaaagggattgagcaaaaaacaggagaaggaaaaagagaattatattaagcagtctcacttctcagtagcagagattgagaaggctctgttcgcatataagaacgaggcggaagtgctgaacgacttgcatgaaaacactacccctctcgccgattatttccacactaacttcctggccaagaagaaggaggaaagcgacaaggagtttgatcttattgccaatattcaggctaagtattcctgtattaagggcatacttaatcgggattatcctaaggaaaagcggctgcaccaagataaaaagaccataggcgacatcaaggcgttcctcgactccctaatggagctgctccatttcgtgaaacagctcagcttgccttccgacacgacgctggagaaagacgaaattttttactcacaatttcagccatggtatgaccaattgcagctgctgattccgctttataacaaggtccgcaattatgcttcacagaagccctacagcatcgagaagttcaaactcaactttcagtcctctactctggcacagggctgggacctcaacaaggaacacaacaagaactacagttttatctttcaggaaaacgacagcttcctgctaggcattatcaatatatatgacgacaaggatattctgagtaaggacactcgccccgaaatattcgtggacgattccccactgaaaaaaatggtgtataaaaacctgggtgatatcaaaagacagctgccccgcatcgcattcagtgacaaggctaaaaagtgtgtcgaaaaaatcggctggaatcaggagatcgaagccatcaagaaagaattcgacgaatttcaggacgccaaaaaaaatgataaggatctttggaaagatgagttcgacaggaaccagctgtccgagttgattgactactacaagggcgtcttgaagaatcactcagaaagatatgaagacacttataagttggaatataaaagcaccgagtcttataaaaatctgggtgagttttttgatcatatcacctcccagacctacaaggtcaccttcgtcggaatagacaaaaactatataaatcgtctggtagatcagggcaagttatacctctttcagatatacaacaaagacttcagtgagtatagtaagggcaagcccaacttgcacaccctgtattggaaggccctgttcgatccagagaacctgaaggatgtaatgtacaaactcaacggcggagctgagctgttttatcggaaaaaaagcataaaggatctggcgatccataaagcgaatgagcctattaaaaacaaaaatccaaacaaccctaaaaaagagtccgtgtttaagtacgagatcgttaaagattacagatacacagtggataagttccatttccacgtccccatcacattaaatttcaaagctacggaagctggatatattaacaatacaatcctcggttttctcaaagataatccggacgtgaacatcattggaatcgacaggggcgagaggcacttgatctaccttactttgatagaccaaagaggaaacattcttgagcagagatctctcaacaccattattaacaagaaattcaatgttaagaccgattaccatggacttttagacaaccgcgagaaggaacgcgataaggctcggaaaaactggggcaccatcgaaactattaaagagcttaaagagggttacattgggataatcgttcacgagatttccagaatgatggtggagcacaatgcaatagtcgtcatggaggacctgaattttggttttaagagggggcggtttaaggtggagaaacagatctaccaaaagctagaaaagaagctgatagacaagttgaattacttgattttcaaggataaggcaaataatgaaacagggggcctatacaaagcactccaactcacctctaagtttgagagctttatcaagctcggcaaacagtccgggttcctgttttacgtcccagcctggaataccagcaaaattgatcccaccactggttttgtgaacctcttcaatacacgctacgagaacgccgacaaggctaaaacgtttttcgacaatttcgaaaacatctgttataatgtggagaaaggctattttgagttcaaagtgaaaaagtactcactgttcaattcaaaggcagacgacacgcgtcaggagtggatcatttgcacacaaggggatagaatcagaactttccgaaaccctgagaaaagcaatcagtgggataacaaggaaatcgtactcctagacgaattcaagaatttattcaaggagtacgggattcgctacgaggaagatctaaagcaccagatcctttcgcaaacagaaaaaaccttctttgaaaaactgctgaacctgttcaagattacagtgcagatgaggaacagcattaccaacagtgagactgattacctcatctctcccgtgatgaatgccaagggggaattctacgactctcgcaaagccggggacaacctgcctaaagatgccgatgccaatggggcctaccacattgcaaaaaaaggactatggctcttgaaacaaattgacgcccacgagggcgaggattggaagaagctgaaattggccattacaaacaaagagtggctgcagttcgctcaagctcggggacgactgaaacgtccggcagcgactaagaaggcggggcaagctaagaagaaaaagggtagcggacctgctgccaagagggtcaagttggacggcagcggcctcgagcaccaccaccaccaccactga

SEQ ID NO: 806 - DNA, 3915 bp, synthetic construct
  misc_feature 1..3915: note = Sequence codon optimized for human expression
  source 1..3915: mol_type = other DNA
atggaaaggaaggatttcatcaattacgatcaggttagcaagactattagaaacggcttaatacccaccgaatacactttaaagaacattgaggaaacaggagtattggttagcgacgagtatagggccgaggtccgaaacgtgctcaagaagatcatggacgattactacaaagagtatataaacatgtgtctgaatcgggagatcaagatggattggcggcccctgtttgatgcctacgaattagtgaagaagggtaaaatgaaacctaaggagattgagaatatccaagacgaaaaacggaaggaaatctacgatatcctgtcagcccatgacgaattcaagaaaatgttttccgccaaaatgatcaccgagctactgccccagttcattagtcagtccactggatataacgaagacgagaagaaacaatacgaagaggtaattcacatctattctagattcacctctgacttcacggatttctttcaaaatagaaagaatgttttctcttctgctgggattgccacgtcaatatgcaaccggatcgtcaatgaaaatgctgagatcttctctgacaacaagtccacttttgatcgaattaagaaggacatcagctatatcgacgaaatcatcgattctgatctgaaaacttatcttgatggttgggagcttgagcagatctacagcgtggacttctacagcagacttatgtcgcagtccggaattgatttctataatatgataagtggcgctgtgaacaaagcagttaacgagtactgtcagaaaaacgggctcaacaagaataaatatttgctcaggaagctgcggaagcaaatcttgtcaaacagcgagtctacttttcagatacccgagaagtttctggcagacgaggaagtctataaggccgtgggacaatttattgacaatatcaagtctaagaacgtcatagagattttgaaggatattggcagcaactgtgagaactatgatctcaggaggatttacatcgctgagagcgcatacgaggatgtgagtatttttatgggctacggctggaacgggatcaaaggttgcctcgaaaagaagtacgaaaaggagattgcacccggaaaggcaaaggacatcaaaatcaagaagctgatctcacaggagaaagagcgaagcattggcgaaattgacgagttgtttcacatctacggcgaagaaaaagacggcaaggccgctatacagtacattgaagaagttgtggagctatgtaacgaggtgcctactcgcctggtgtatgattcttctgaaaagctgacagagaatgataataaggctgcggagatcaaaaatgtccttgattattatttcaaaatcttccattggattaaaacttttataacggacgatatcctcgataaggatatcgtgttctattccggaatagaatttgcctacgaggaaattaaggatatcgtcccgctgtacaacaaggtccgcaattacgtgacccagaagccatactcttcagagaaaatcaagctaaaattcggtaccccaaccctggccaatggatggtcaaagtctaaagagtttgacaacaatgcaatcctattggtccgggataacaaatactacctgggcatttttaatgtgctcaacaagcctgacaagaagatcatggctggctacgccaataagaaaaattccagtgactatgcgaaaatggtctataacctgctccctgggccttccaaaatgttgcccaaagtgtgtctgtcccaaaaaggcaaagacacataccatccaagcgcgtacatcgttgacaactatgagcgcaaggcccacgtgaagagcagcgagcattttagtatccagtactgtcacgatctgatagactattttaaggagtgcatcaagaggaacgacgactggaaatgctttgacttcaaattctccgatactgagcaatataacgacatcagtgagttctacaaagaggtggaattacagggctattcaataggctggacctacattagcggggaggatatcgaagccctcgataaagaagggaaactgtatctattccagatttataataaagacttctcagaacagagccatggtacagacaaccttcacaccatgtacctcaaaaacctgttctcaccggaaaacctgaataacatcgtactaaagctgaatggtgaggccgagctgttctatcgtaaatccagtattaagaaaccagtggtgcacaagaaagggtcaatattggtgaacaagacctacacagaaaagactggcaacggcgaggaagtccgacgtcctgtgccagacgacgtctatctggaactggtaaattactacaatggggagcaaaaagcaatcctcagtgacgaagctaaaaaatatatgaaagtcgtggagcaccatgaagccgttaaggacatcacgaaggattacagatatacagtgaacaaattttttatccacctccccatcaccattaatttcaaggccgagcatacaggcaacctgaacgagatggtgatccagtacattgccaaacaggagaatatgcatgtgattggaatagacaggggggagaggaatctgatatacgtgtccgtgatcgacatgaatggaaagataaaggagcagaagtcgttcaatatcgttaattcgtacaactaccaggaaaaacttagggggagagaaaaggaccggttgaatgcacgcaagaactggaagcaaatcgcgaatatcaaggagatgaaagagggatatctgagccttgttatccacgagataaccgaaatgatgatgaaatacaacgccattattgcaatggaggacctgaactatggattcaaaagaggtaggtttaaggtggaacggcaggtctatcagaaattcgagacaatgctgatcagtaagctgaattacctcgtagacaagcataaaaaggtcgacgagcccggcggcctgctgagaggatatcagttcgcttatgttcccgcttcgctcgacagactcggacggcagtgcggattcatattttatgtaccagccgcctataccagtaagattgatccgacaactgggtttgtcgacctctttaatcactccgagttaatcaaggctgggaagcgccgcgataatctaagcaaattcgatggaatttactatgatgaacagaaggacatgttttgctacgccttcgattacaagaatttcgtgacacacaacacggatatttaccaaaattcctgggaaatatacaccaacaaggagcgccttcggaagattttcggcaacggtcgcccaaccggcaaaacagagaaaatcgaacttacccaaatgatgaaggaagtgcttacaggtgcgggggtggaatacaaggatgggcacaatctgattgatgacattctcaactctaacgataactgcattaaacaggtactggatattttcctgtactccatccagcttagaaactccaaaggggaaaatgaggactcaaaggaatctgattatgaccgaataattagccctgtgttaaaccaggagaatgagttttttgactccgtagtctatgcagacaaatataagaaagacgaaaagctcgccgataaaccaattgatgctgatgcgaatggtgcatactgcatcgcattgaaaggactgtacgaaattttgcagattaaaaacaattggaaggagggggaagttttcagtcgcgacaccttaaaaatcacaaacgctgactggctgcgttttatgcagagccgtggctttgagaaacgtccggcagcgactaagaaggcggggcaagctaagaagaaaaagggtagcggacctgctgccaagagggtcaagttggacggcagcggcctcgagcaccaccaccaccaccactga

SEQ ID NO: 807 - DNA, 3960 bp, synthetic construct
  misc_feature 1..3960: note = Sequence codon optimized for human expression
  source 1..3960: mol_type = other DNA
atgaacaagttcgaaaatttcaccggactctaccccattagcaagactctgcgtttcgagctaataccccagggcaaaacacttgagtatattgagaaatctgaaatactggaaaacgacaactaccgagccgagaaatacgaggaggtaaaggacataatcgatggctatcataagtggttcatcaatgaaaccctgcacgatctccatattaattggtctgagctcaaagtagctctggaaaacaatcggattgagaaatcagacgcctccaaaaaggagttgcaacgggtccagaagatcaaaagggaggagatctataacgctttcattgagcatgaagcttttcagtacctgttcaaagagaacttgctttccgatctgttgcccatccaaatagaacagagtgaggacctggatgcagaaaaaaagaagcaggcagtagaaaccttcaacagattttcaacatacttcacaggcttccacgagaacaggaagaatatttacagtaaagaaggtatctctacaagcgtcacttaccgcatcgtgcacgacaatttcccaaaatttcttgagaatatgaaggtgttcgaaatactcaggaatgagtgccctgaggttatttcagatactgccaatgaacttgctccatttatcgacggcgttagaatcgaagacatttttctgatcgacttttttaactccacattctctcagaacggaatcgactattataatcgcatacttggcggcgtgaccaccgagacgggggaaaagtaccgaggcataaacgaatttaccaacttgtatcgacaacagcaccccgaattcggcaaatccaaaaaggctactaaaatggtggtcttgtttaagcagatcctgagcgaccgcgatacattgtcatttatccctgaaatgtttgggaacgacaagcaggtgcagaattctatccagctgttttataaccgtgagatttcacagtttgaaaacgagggtgtgaagacagatgtttgtactgccttagccaccctcaccagcaagatcgcggaatttgacacagagaaaatctacattcaacagcctgaattaccgaatgtcagtcagaggttgtttggatcttggaatgagctcaatgcatgtctgtttaaatacgccgagctgaagtttggaaccgccgagaaggtggccaatcgaaaaaagatagacaagtggctgaaaagcgatctgttctccttcaccgagctgaataaagcactggaattttctgggaaggacgaacggatcgagaattatttttcagagactggtatttttgcccaactcgttaagaccggatttgatgaggctcagtccatcctggaaacggaatacaccagcgaagtgcacctgaaggatcagcagaccgacatagagaagattaagactttccttgacgctttgcagaacctaatgcacctgcttaaatccctgtgcgttagcgaggaagcggaccgcgatgcggcattctacaacgagtttgatatgctgtacaaccaactgaaactagtggttcccctctacaataaagtaagaaactatatcactcagaagttattcagaagcgataagatcaagatctatttcgaaaacaagggacaattcctcggaggttgggtcgactcacagacagagaacagcgataacggaacccaggcagggggatacatatttaggaaggagaacgtcataaacgagtacgattattatctgggaatctgtagcgacccgaagctgttccgccgaacaacaatcgtgtcagagaacgacagaagctcattcgagaggcttgattactatcagctcaaaacggcttctgtttacggcaatagttactgcgggaagcatccttacaccgaggacaaaaatgagctggtcaactcgattgaccggtttgtgcacctgtccggcaacaacatccttatcgaaaaaatagctaaggataaagtgaaaagtaaccccaccacaaatacaccttcgggttacttgaacttcattcatcgcgaggccccaaatacttacgagtgcctactacaagacgagaatttcgtaagcctgaatcagagagtcgtaagcgctttaaaggccactctagcgaccttggtcagagtgcctaaagccttagtgtacgccaaaaaggattaccatctgttctcagagattatcaatgacatcgacgagcttagttatgagaaggccttttcgtactttcccgttagccagactgagtttgagaacagctcgaacaggacaataaagcccctgttgctgtttaaaataagtaataaagatctgagtttcgcagagaatttcgaaaaggggaacaggcaaaagattggcaaaaagaatttacacactttatatttcgaagcactcatgaagggcaaccaggacacgattgacattggaacggggatggtgtttcatagggtgaaatccctcaattacaatgaaaagacgctgaagtatggccatcactctacccaactcaatgagaagttctcctaccccattattaaagataaacggtttgcaagtgacaagttcctgttccacctgtccaccgagattaactacaaggaaaagagaaagccactgaacaattccatcatcgagttcctcactaataatccagatataaatattattggcctcgaccgcggggaaagacacctcatctatctgacgcttattaaccagaagggggagatcttgcggcagaagacattcaacatcgttggtaacaccaactatcacgaaaaattgaatcagcgcgaaaaagagcgggataacgcccgtaagtcttgggccacgattgggaagatcaaggaactgaaggaagggttcctctccctagtaattcacgaaatcgctaaaattatggtggaaaataacgccatcgtggtgttggaggacctgaatttcggcttcaaaagaggtcggtttaaagtcgagaaacagatctaccagaaattcgaaaagatgctgatcgacaagttaaactatctcgtgttcaaagacaaaaaggctaacgaagctgggggagttctgaaggggtatcaactcgcagagaagtttgaatctttccagaaaatgggtaaacagagtggctttcttttttacgtccctgctgcatatacatctaagattgacccaaccaccggatttgtgaacatgctcaaccttaactacacaaacatgaaggacgcgcagactctgctgtccggcatggacaaaatttctttcaacgccgacgccaattatttcgagtttgaactcgattatgagaagttcaagactaatcaaacagatcacactaataagtggaccatctgcacagtgggcgaaaagcgcttcacctacaattcagctaccaaagagacaaccacggtgaacgtgactgaagatctcaagaagctgcttgacaaatttgaggtgaaatacagcaatggcgataacatcaaggatgaaatctgcaggcagacagatgcgaaattcttcgaaatcattctctggctgctcaaattgaccatgcaaatgcggaactccaatacaaaaactgaggaggattttatactgagcccggtcaagaacagtaatggggagttctttcggtccaacgacgatgcaaatggtatctggccagccgatgccgatgccaacggcgcatatcatattgcgttaaaaggactgtatctagtcaaggagtgtttcaataaaaatgagaagagccttaagattgagcataaaaattggtttaagtttgcccagacccgtttcaacgggagcctgactaagaatggaaaacgtccggcagcgactaagaaggcggggcaagctaagaagaaaaagggtagcggacctgctgccaagagggtcaagttggacggcagcggcctcgagcaccaccaccaccaccactga

SEQ ID NO: 808 - DNA, 4059 bp, synthetic construct
  misc_feature 1..4059: note = Sequence codon optimized for human expression
  source 1..4059: mol_type = other DNA
atgttagacagattcaccaaccagtacagcgtaactaaaacgctcaagttcgagttacggccaatggggaaaaccctggagcacgtacagaaaaagggcttcgtggaaactgacgagaaactggcaactaattataagcggatcaagaagaccattgacgtctaccataaagacttcatcagccgtgccctgtcacagctctcaatcagcaatctggacgagtttttggcatcttatgaggataataagaagaaccctgacgacaaaacaaagaaacagctagtgcgcattcaagataacctgcggaagcagatcacttctgcatttacggctgccgagtttaaaacggagttctccgagctcttcaagaaagaacttctgaccaaaaacctggagagctttgtgttggaatataacaagaaaaatgatgctgaccttttctttgtggatgactttaagaattttgcgacctattttataggctttcacgagaacagaaagaatatctactccgcggatgcaaaacacaccgcgctggcctttagaatcatccatgaaaatttaccaaagttcatcgaaaacatgaattccctccagttgattaaggacgactatcccgcactgtacgagtcgctgcagaatcaggtgagtaccgagctgagcagcattttctctgctggcttcgtactagacgatgtccttaatattagtttctacaatgaacttcttagccaacagggaatcgatagatttaaccaactgatcgggggtgtttcaacccagagcggggccaaaaagactcagggcctgaacgagcttatcaacgagtacaaccaacagtctccacgcagtagcgggaatcgcaaagcccccaaaattcggccgctctataagcaaattctcagtgatcgcggctccctgtcattcctgcccgagaagtttgctgatgatcgcgagctgtacgatgctattaacgactattatctttcccacctactgatggtgcctaacgattcctccgagcataccctattggattcactgaaacacttggtggcctcgctgccctcgtttgatctgacgaaaatttacctgaagaatgataaggccatttcttctatctctaatcgcctcttcggagattatagcgtactgcctatcgctttaggatactattatgatcatcacattaaccctgaccacctagatcaactggccgccgcaaaatcacagaagaagactagtgacctgtacaaaaagaaggacgcctttaccaagggataccactctgtagcgacaatcgaggctgcctaccaggcctatttggccagcaccgactctgacaacgggctccgtaagagtgggattatcaaccccgtgcaagattactttacacgatacttcgttaatgagcccaaagaggatggcaaagcagccgttgacctgcttagggacattgataacaaatacactacgatcaaaggagtcctaaactccgaaattgaggagggaacacgacaactgcttcaaaaaggggctgaggttgctaatataaagcatttcttggatgccgttatgaatctaattcatttcgtcaagccgcttgggagtgtgatcgaagaggactcccttttagacattgacgcgaggttctataatgactttctcccgctctacgaggaactgaagctgttctttcccctctataacaaagttaggaactacataagccagaaaccttactcaaatgagcagtttaaactgaatttcgaaaacgcaaatctgctagaagggtgggatgtgaacaaggaaaagtccaggttgtccgtgttgttacagcgggacggacgttactacctggctctgatggacaagagccataaaaaagtgttcgaacaagcacctgaaataacaccaggcagcgagaactcaaactctccatatcagaagatgaggtataagcttctgcccggtcctaataagatgttccctaaggtgtttttcgcaaagggcaatattgactattttgccccttcccagcagttgctagaaaattatgagaagggcacacacaaaaagggcgacgacttcaacatcgagcattgccaccagctgatcgacttctttaagcagagcgtggctaagcacaaagactggcatgagttcggcttcaaattttccgacacttccacctacaaggatatatctgaattttacaacgaagtgtctaagcagggatataaggtcacattcgaggatgtcgacgctgattatattgatacattagtggaaaatggacagctgtaccttttcgagatctataataaagatttcagcgttaattctagaggtaaacctaacctccataccatctatttcaaagctctgttcgatgacgagaacctcaaggatgccgtctataagttgaacggggagggtgagttgttttaccgcaaggcgtcaatcgatccagaaaatacaattaagcataagaagggggaaagagtctacagcaaaaaccccctgacaccagatgcttcaagagtgttggattatgagatagtgaaagataaaaggtacactgctgacaagtttctgctgcacctgccagtcaccatgaattttaaagccgacggcatcgggcccggccagttcaacaacctcgtgaaggacaccatccgggatgatcagaataaagacatgcacctcatcggtatcgacaggggggagcggcacctactgtatttaacagttatcaaccaggacggattgatcattcatcaagaatcgttaaacgacgttgtgagctcaaacaagacagtcactccataccacacgctgctggacacacgggaaaaagaacgcgatgacgcccgaaagaactggggagtgatcgagaacataaaggaccttaagaagggctatctgagtcaggtagtgcacaagttggccaaactcatttatgagtataacgccgtggtcgtcctggaggacctgaactttggattcaagaggggcagatttaaagtggagaaacaggtatatcaggccttcgaaaaggcactcatagacaaactcaactacctcgtgtttaaagaatttgagtccgacgccctcgggggcgcaagaaaggccttacaactcacctctgcattcaccgccttcaaagatcttggtaagcagacagggttcctcttttacgttcctgcatggaataccagtaagatcgaccccgttactggatttgtagacctgctcaagccaaaatatgagaatgtcgagcaggcaaaagactttatcgatcggtttgactctattcgctataataaagaaaaggatttctttgaattcgaatttgattactccaacttcggcacccgagcgcaagacactcgaacagactggacgatatgtagccacggtactaagaggtacgtgtacgataagaatgctaacaataataagggtggtcagaaacagatcgacgtgaataccgagttgaaagctctgttcagtagttacgacatcgattaccatggcgaactggcgggcagggatctgcgtccgatgatcaaaagcaagggcgataagagcatgtacagctccattattttcctcctgaaaaccttgctcgcaatgcgatacagtaagacaaacggcagcaaggtcgaagatttcattcttagtccagtgtcaaacgatgctggagtctttttcgacacaagagattacgacggaatggacgccgattcctcctcagaaacctccaccgtgctccccaaggacgccgacgccaatggcgcctaccacatagcactcaaggggctgtgggtgatgcggcagatacagagccacactggagacgattacaaaggtctggatctgaagataactaataagaactggcttgaattcgtccaaacaaaaccctaccagaaaaaacgtccggcagcgactaagaaggcggggcaagctaagaagaaaaagggtagcggacctgctgccaagagggtcaagttggacggcagcggcctcgagcaccaccaccaccaccactga

SEQ ID NO: 809 - DNA, 3867 bp, synthetic construct
  misc_feature 1..3867: note = Sequence codon optimized for human expression
  source 1..3867: mol_type = other DNA
atgaaaaagattgattccttcactaactgctactccctcagcaagactctgaggtttaagcttattccaattggggctacccaatccaactttgacttaaacaagatgctggatgaggataagaaacgggcagaaaattattctaaagcaaaaagcattatcgacaagtatcaccgatttttcatcgacaaagtcctgagtagtgtgacggagaataaagcttttgactccttcctggaagacgtgagggcctatgccgaattatactatcgcagcaataaggacgatagcgacaaggcgagtatgaagacactggagtctaagatgcgaaagttcatagccctggcgctgcagagcgacgaagggtttaaggatcttttcgggcagaacctcattaaaaagactctaccagagttcctggagtcggatacagacaaggagatcattgcagaattcgacgggttcagcacctactttaccgggtttttcaataacagaaagaatatgtactcagctgatgatcagcccactgccatctcctatcgctgtatcaatgacaacctaccaaaaatcctcgacaatgttcgcactttcaaaaattcagatgttgcaaacatcttaaacaacaatctgaagattctgaacgaggacttcgatggaatctacgggacttccgcagaagacgtcttcaacgtggattatttcccttttgtgctgagccaaaaaggtattgaggcttacaattcgatcctcggaggctatacgaactctgacggctctaagataaagggcctgaatgagtatattaatctgtacaatcagaagaatggaaatattcatcggatccctaaaatgaagcagctgttcaaacagatcctatctgaacgcgaatccgttagctttatcccagaaaaattcgatagtgacgacgacgtattgagctcaatcaacgattactaccttgagcgggacggagggaaagtgctcagtatcgaaaagaccgtcgaaaaaatcgagaagctgttctcagccgtgactgattacagcaccgatggaattttcgtgaaaaacgctgccgaactcacggcagtgtgttccggtgcttttggttactggggaacagtccaaaatgcctggaataacgagtacgacgcgctgaacggctataaggaaaccgagaagtatattgataaaaggaaaaaggcttataaaagtgtcgagagcttctccatcgccgacattcagaaatacgccgatgtctcggagagctctgagacaaatgcggaggtaactgagtggttgcggaatgaaattaaggaaaagtgtaacttggcagtacagggatacgagagctcaaaggatctgattagcaaaccatataccgagtcaaaaaagttattcaacaatgacaacgccgtggaactgatcaaaaacgccctagatagcgtgaaagagctggagaacgtcctgcgccttctcctgggcactgggaaagaggaatccaaggacgagaatttctacggagagttccttccctgctacgagcgaatttgtgaagtagatagcctgtacgacaaagtgaggaattatatgacccagaaactgtataaaactgacaagattaaactgaacttccacaatcctcagttcctagggggctgggataggaataaggaggcagattatagcgctgtgctccttagacgcaactctttgtattatatcgccatcatgccgtccggctacaagagggtcttcgagaagatccccgcacccaaggcagatgaaacagtttacgaaaaggttatctataaattgttaccgggtcccaacaagatgctccccaaagtttttttttctaagaaaggaatagagacattcaacccacccaaggagattcttgagaagtacgagctagggacgcacaagacaggcgacggatttaatttggacgattgccgggccctcatagactactttaagagcgccatagacgtgcattccgactggtccaactttgggtttcgtttttcagatactagtacctataaaaacattgccgatttttataacgaggtgaaaaaccaaggatataaaatcactttttgcgatgtgcctgagagttacattaatgaacttgtggacgagggcaaactgtacctctttcagctgtacaataaggatttttcagaacacagcaaaggtaccccgaatctccacacactttactttaaaatgctgttcgatgaaaggaatttagagaacgtggtgttcaaactcaacggggaagcagaaatgttttatagggaggcctctatatccaaggacgatatgattgtccaccctaagaaccagccaatcaagaataaaaacgagcagaactctcgaaagcagagcacctttgaatacgatattgtgaaagaccggcgttacacagtggaccagttcatgctacatatccccatcactctcaactttaccgctaacggcggtaccaacataaataacgaggtgcggaaagctctgaaggattgcgataaaaattatgtgattggcatcgaccggggcgagagaaatctgctgtatatatgcgtggtagacagtgaaggccgaatcatagaacagtactccctcaacgaaatcataaatgagtacaacggcaacacatactccacagactatcatgctcttctggataagaaagagaaggaaaggttggagagtagaaaagcgtggaagacagtggagaatatcaaggagctgaaggaagggtatatcagtcaggttgttcacaagatttgtgaattggtagagaagtacgacgccgtgatagtcatggaagacttgaactttggcttcaaacagggtagatcaggcaaattcgagaagagcgtttaccagaaatttgagaagatgcttattgacaaactcaactactttgctgacaaaaaaaaatctcccgaggaaattggtagcgttctcaacgcctatcagctgactaatgcttttgaatctttcgaaaaaatgggaaagcaaaacggtttcatattttacgttcccgcatacctcacctccaagattgatcctaccaccgggttcgctgatcttttgcatccgtcatcaaagcaatctaaggagagcatgagagatttcgtcgggaggttcgactctattacattcaacaagaccgagaattactttgagttcgagctggactacaataagtttcctagatgcaacacagattatcggaagaaatggacggtatgtacatacggatcgcgcataaagacattccgcaatccagagaagaactctgagtgggacaacaagaccgtcgaactcacgcctgcctttatggcccttttcgaaaagtactcaatcgacgtcaatggcgatattaaggcacaaatcatgtccgtcgacaagaaggatttcttcgtggaactgatcggcctcctgcgcctgaccttgcagatgagaaattctgaaaccggaaaagtggatagagattatctgatctcaccagtcaagaattccgaaggcgtgttttacaattccgacgactataaaggcatcgagaatgcgagtctgcctaaggatgccgacgcgaacggagcctacaacatagccagaaagggcttgtggatcattgagcaaatcaaagcctgcgaaaatgacgcagagctgaataagatccgtttagccatcagtaacgctgaatggttagagtatgctcagaagaaaaaacgtccggcagcgactaagaaggcggggcaagctaagaagaaaaagggtagcggacctgctgccaagagggtcaagttggacggcagcggcctcgagcaccaccaccaccaccactga

SEQ ID NO: 810 - DNA, 4026 bp, synthetic construct
  misc_feature 1..4026: note = Sequence codon optimized for human expression
  source 1..4026: mol_type = other DNA
atggccgcattcgataagttcatccatcagtaccaggtgtcgaagaccttgcgattcgctctcatacctcagggcaagacactcgaaaacactaaaaataacgtgttgcaggaggatgacgaacggcaaaaaaactatgagaaagtgaaacccatcctcgatcgtatctataaagtttttgctgaagaaagtctgaaagactgttccgtagattggaatgacttaaacgcctgcctggacgcgtatcagaagaacccgagtgctgataagaggcaaaaggtcaaggctgctcaggacgccctgagagacgaaatcgctggatatttcaccggcaagcagtatgcaaacgggaagaacaaaaatgccgttaaggagaaagagcaggcagaactttacaaggacattttttcaaagaagatcttcgacggcacagtgacaaataacaaattaccacaagtgaacctgagcgccgaggagacagaactactgggttgtttcgacaagttcacgacctactttgtgggcttttaccaaaacagagaaaatgtgttcagtggcgaagacattgctacagcaatcccgcacagaatcgtccaagataatttcccaaaatttcgcgagaattgccggatctaccaggacctcatcaagaatgagcccgcactgaaaccactgctacaacaggcagctgcagccgtgatggcgcagaacccgaaggggatctatcagcctagaaagagccttgacgatatcttcgtgattcctttttacaaccacctcttgctgcaggacgacattgactattttaatcaaatattgggcggaattagcggagccgcgggacagaagaaaattcaggggttaaatgagacaatcaatctctttatgcagcagcatccccaggaagctgacaagctcaagaagaagaaaatccgacacagattcatccccctgtataagcaaatccttagcgacaggactagcttttctttcatcccagaggccttcagtaattctcaggaagctctcgatggcattgaaactttcaagaaaagcctgaagaagaacgacacatttggagctctagaacgcctgatccagaatctggcatcacttgatctcaaatatgtctatctgtcaaataagaaggtgaacgagatctctcaggccttgtatggggagtggcattgcatccaggatgtcttaaaacaggactttagcctggaatcattgattcaaatcaaccctcaaaattctagtaacggcttccttgctacactgaccgacgagggaaaaaaacgcatatctcagtgtagaaacgtgctgggcaatccactccctgttaaattggcggacgaccaggataaggcgcaggtgaaaaaccagctggataccctgctcgccgcagtgcactacctggagtggtttaaggccgacccggacctggagacagacccaaacttcacagtcccttttgagaaaatctgggaggagctggttcccctactctccctgtactcaaaagtacggaactttgtcacgaagaagccatacagcaccgcaaaatttaaactcaatttcgctaatccaacacttgctgatgggtgggatattcataaggagtctgacaatggagcacttctgtttgaaaaaggcggcctttattacctggggatcatgaaccccaaggataaacctaattttaagagttaccagggcgctgagccttactatcagaaaatggtgtatagattttttcccgattgttccaaaactattcctaaatgcagtacccaacggaaagatgtgaagaagtacttcgaagatcacccccaggccacttcataccagatacacgactccaaaaaggaaaagttcagacaagatttcttcgagatccccagggaaatctacgaattaaacaacaccacttacggcactggtaagtccaaatacaaaaagtttcagacccagtactatcagaagacacaggacaagtcaggataccaaaaagccctaaggaagtggatagacttttctaaaaagttcttgcagacctatgttagcacaagcatattcgactttaagggtctgaggcccagcaaagactatcaagacctaggcgaattctataaggatgtaaatagtcggtgttaccgcgtgacgttcgagaagattcgagtgcaggacattcacgaggctgttaagaacgggcaactgtacctcttccagctctataataaggattttagtcccaaatcacatggactgcccaatctccacactctgtactggaaagccgtgttcgatccagagaatctaaaggaccctattgtcaaattaaacgggcaggccgagttattttaccgccctaaatctaatatgcagataatccagcacaagaccggcgaggagatagttaataagaaattgaaggacggaacccctgtgccggatgacatttaccgagagatctccgcttacgttcaaggtaaatgccaaggcaacctctcaccagaggcagaaaaatggcttccatcggtaactattaagaaggcagcacacgatataactaaggataggcgttttaccgaggataaatttttcttccatgtacccataaccctgaactatcagtcttccgggaagcccacagccttcaatagccaggtgaatgactttctcaccgagcacccagaaactaatataattgggattgatcgcggcgaaaggaatctgatttatgccgtggtgataaccccagacgggaagattttggagcagaaaagcttcaacgtcattcacgatttcgactaccacgaatccctgtcccaacgggagaaacagcgggtcgcggcccggcaagcgtggaccgcaattgggcgtatcaaggatcttaaggaaggataccttagcctggttgtgcatgagattgcccagatgatgatcaaatatcaggcagtggtagttctcgaaaacctgaacacggggttcaaaagggtcagaggcggtatttccgagaaggcggtttaccagcagttcgagaagatgctgatcgagaagcttaacttcctggtgtttaaagacagggccatcaaccaggagggcggtgtgctgaaggcctatcagctcactgactcctttacctcgtttgctaaactgggaaatcagtccgggtttctcttctacatcccatccgcctatacatccaagattgatcccggaacgggtttcgtcgacccttttatttggagccatgtgacagcttcggaagaaaaccggaacgagtttcttaaggggtttgattctctaaaatacgacgctcagtcctccgccttcgtcctccatttcaagatgaagagcaataagcagttccagaagaataacgtagaaggattcatgcctgagtgggacatctgcttcgaaaagaacgaagaaaaaatcagcctgcagggcagtaagtacactgccggtaaacgtatcatatttgattctaaaaagaagcagtatatggagtgctttccccaaaatgagttgatgaaagccctgcaagatgtgggaatcacgtggaacaccgggaatgatatctggcaggatgtcctgaaacaggccagcactgacaccggattcaggcatcggatgattaatctgattcgatctgtgttgcagatgagatcaagcaacggtgcaaccggtgaggactacattaactcacccgtcatggatttggatggcaggtttttcgacacacgagccggcatccgcgaccttccgctggatgccgatgccaacggagcatatcacatcgccctgaaagggcgcatggtcttagaacgcattcggagtcaaaagaacacggccatcaaaaacaccgattggctgtacgcgatacaggaggagagaaataaacgtccggcagcgactaagaaggcggggcaagctaagaagaaaaagggtagcggacctgctgccaagagggtcaagttggacggcagcggcctcgagcaccaccaccaccaccactga

SEQ ID NO: 811 - DNA, 3849 bp, synthetic construct
  misc_feature 1..3849: note = Sequence codon optimized for human expression
  source 1..3849: mol_type = other DNA
atggtcgcattcgtcgatgagttcgtgggacagtatcccgtcagcaagacgttacgcttcgaagcacgtcccgtgccggaaaccaagaagtggctggaatccgaccagtgtagtgttttatttaatgaccagaagcgtaacgaatactacggtgtgttgaaagagctgctagacgactactaccgcgcatatattgaagacacactggctgcgttcactctcgacaaagccctgcttgagaacgcctacggcctctattgcaatagagataataatgcctttagctcctgttgcgagaagctgagaaaggatttggtcaaggctttcgcgaacctgaaagactatctccttgggtcggaccaattaaaggacctggtgaagctgaaagcgaaggtggctgatagcgctggcaaaagcaagaagaaaattgaggtagacagcaggttactggcttggttaaaaaacaatgctaaatacagtgccgaggatcgtgttaagtactgcgaggctatcgaggcattcgagggcttcgtaacctatctcaccaattataagcaggcccgggagaacatgttctcctctgaggataagtcaacggcaatcgctttcagagtgatcgatcaaaacatggtgacctatttcggcaatatacggatctacgagaaaatcaaagccaagtatcctgagctgtacagcgctctgaaggggtttgagaaattcttttaccctgccgggtattccgagatcctttcacagaataaaatcgacgaatacaattacaaatgcattgggcgccccgtggaggacgccgattataagggtgttaatagcattatcaatgagtatcgacagaaaaaaggcatcaaaagcagggagctacctgtcatgagtatgctgtataagcaaattctctcagatagggataatgactttatgtctgaggtgatcacaagcaatgaggaggccatcgaatgtgctaaggctgggtacaaaaagagttatatactgtttaacgagctgctccaattgtttaacaactctttcatcgaagaaaactatgaatacatctatataaagacacaaccactgactgagctgtcacagagtttgtttggagattggtcagtgctaaggaacgccctggacaatgccaagtacgacaaggagattattaatctggccgaactagttaggtactttagtgaatactgccagattctggatgcggacgacgccgtcaagatcaagaacaagttcatcctggaagactactttgtgcaggatacactggaagctgcattgcctgacctcgataagattacgcagtataaaacctatctcgacaacatgctgcaagttatcagaaaatataggctgttctccatgtataatggacgcaaaaagctcgatgtgcctgaaaagggcatggatttctcaaatgaattcaatgacatatacgataagctgtctgagttctctattctctacgaccgaatccgcaacttcgcgaccaagcggccctattccgacgagaagatgaagctgtcattcaacatgcccactatgctagccggctgggattacaacaacgagactgccaacgggtgttttctgttcatcaaggacggcaagtattacctcggcgttgctgactcgaaatcgaagaacatttttgatctcaaaaagaatccccacctgtgggacaaatattcctttgaaaacgccttttacaagataaaatataaacagattagcggggcagccaagatgttgcctaaaaccttcttgccatccaaagggaagccactcagcgaagaaaagaagaaaaagtatggtcacctggtcacagaccggatcatcgaaattcgtgataatggactgtatatgaaaagcgcaggagacagaaaagcggtgattgaatggattgacttcatgaaatcagccattgccatccatccagagtggaacgaatactttaaatttcatttcaagaataccgaggaatacgcctccgcaaatgagttctacgaggatatggataagcagacatactctcttgaaaaggtcaagatccctgccgcatacgtagacgaactggtcagtcagcacaaactttacctctttcaactttataccaaggactttagcgacaagaagaagaaaaaaggaactgacaatctccacactatgtactggaacggtgttttcagtgacgagaaccttaaagcgatcgctgaaggcacaaagccaataattaaactcaatggcgaggctgaaatgtttatgcggaacccctccattccacgaaaaataacacacgaaagaaacaagccgatcgctaacaaaaatccattgaacaataaaaaggagtctcttttttcctacgatctgattaaggacaagcggtatactgaacgaaagttctatttccattgccctatcacactaaactttcgcgcggccaagccgacgaaatacaatgagaaaattaatcggttcgtggagaataaccccgacgtgtgtatcataggaatcgatagaggcgaacggcacctcctgtattacaccgtgatcaatcagaccggggatatactggagcagggtagtctgaataagatcagctcaagctatacaaacaacaagggcgagaaggtaaacaaagaaaccgactatcatgccctgctcgataggaaagaaaagggcaagcatgctgcccaacaggcatgggaaaccattgaaaacataaaggagttgaaggcaggttacctgagccaggtggtgtataaattgactagactgatgcttaaatacaacgccgtaattgtactggagaatcttaacgtgggattcaagcgaggccgaactaaagtagaaaagcaggtctaccagaagttcgaaaaggcaatgatagataaattgaattacttagtgtttaaagaaagaggatacgagatgaacggaagttacgcaaaaggactgcagcttaccgataaatttgagagtttcgagaagatcgatattgataagcagaccggatgtatctactacgttatccaatcctacacatctcacatcgatccaaaaacaggttttgtgaacctgctcaatagcaaattaaaatacgagtccgtctccaaggcccaggagactattcggaaatttgataggatctcttataacgcaaaagcagactactttgaattcagctttgactatggcaagttcggaatagatatgtttagaaatgagtgggttgtctgtacctgcggtgactggaggtgggagtattcggcaaaagaccgcgagacaaaagcctactgcgtgaccgacaggctcaaggagttgttcaaaagccacggcattgactatgtggggggtgaaaacattgtttcaaagattgctgatgtcgctgacaagaggttcctgtctactcttttgttttacctacgcctcgtgttcaaaatgcggtatacagtgtcaggcacggataatgagaatgatttcatcttatccccagtggagtacgcccccgggaagttcttcgactccagagaggccgccgcgactgagcccatgaatgccgatgctaacggggcatatcacatagccctaaaggggcttatgaccatccgcggcattgagaacggcaagctgcataagtttgggaaaggaggggagaaggcagcttggtttaaatttatgcagaaccaggaatacaagaacaacggaaaacgtccggcagcgactaagaaggcggggcaagctaagaagaaaaagggtagcggacctgctgccaagagggtcaagttggacggcagcggcctcgagcaccaccaccaccaccactga

SEQ ID NO: 812 - DNA, 9416 bp, synthetic construct
  misc_feature 1..9416: note = pET21b-GIG17 Plasmid
  source 1..9416: mol_type = other DNA
ccttttgctggccttttgctcacatgttctttcctgcgttatcccctgattctgtggataaccgtattaccgcctttgagtgagctgataccgctcgccgcagccgaacgaccgagcgcagcgagtcagtgagcgaggaagcggaagagcgcctgatgcggtattttctccttacgcatctgtgcggtatttcacaccgcatatatggtgcactctcagtacaatctgctctgatgccgcatagttaagccagtatacactccgctatcgctacgtgactgggtcatggctgcgccccgacacccgccaacacccgctgacgcgccctgacgggcttgtctgctcccggcatccgcttacagacaagctgtgaccgtctccgggagctgcatgtgtcagaggttttcaccgtcatcaccgaaacgcgcgaggcagctgcggtaaagctcatcagcgtggtcgtgaagcgattcacagatgtctgcctgttcatccgcgtccagctcgttgagtttctccagaagcgttaatgtctggcttctgataaagcgggccatgttaagggcggttttttcctgtttggtcactgatgcctccgtgtaagggggatttctgttcatgggggtaatgataccgatgaaacgagagaggatgctcacgatacgggttactgatgatgaacatgcccggttactggaacgttgtgagggtaaacaactggcggtatggatgcggcgggaccagagaaaaatcactcagggtcaatgccagcgcttcgttaatacagatgtaggtgttccacagggtagccagcagcatcctgcgatgcagatccggaacataatggtgcagggcgctgacttccgcgtttccagactttacgaaacacggaaaccgaagaccattcatgttgttgctcaggtcgcagacgttttgcagcagcagtcgcttcacgttcgctcgcgtatcggtgattcattctgctaaccagtaaggcaaccccgccagcctagccgggtcctcaacgacaggagcacgatcatgcgcacccgtggggccgccatgccggcgataatggcctgcttctcgccgaaacgtttggtggcgggaccagtgacgaaggcttgagcgagggcgtgcaagattccgaataccgcaagcgacaggccgatcatcgtcgcgctccagcgaaagcggtcctcgccgaaaatgacccagagcgctgccggcacctgtcctacgagttgcatgataaagaagacagtcataagtgcggcgacgatagtcatgccccgcgcccaccggaaggagctgactgggttgaaggctctcaagggcatcggtcgagatcccggtgcctaatgagtgagctaacttacattaattgcgttgcgctcactgcccgctttccagtcgggaaacctgtcgtgccagctgcattaatgaatcggccaacgcgcggggagaggcggtttgcgtattgggcgccagggtggtttttcttttcaccagtgagacgggcaacagctgattgcccttcaccgcctggccctgagagagttgcagcaagcggtccacgctggtttgccccagcaggcgaaaatcctgtttgatggtggttaacggcgggatataacatgagctgtcttcggtatcgtcgtatcccactaccgagatatccgcaccaacgcgcagcccggactcggtaatggcgcgcattgcgcccagcgccatctgatcgttggcaaccagcatcgcagtgggaacgatgccctcattcagcatttgcatggtttgttgaaaaccggacatggcactccagtcgccttcccgttccgctatcggctgaatttgattgcgagtgagatatttatgccagccagccagacgcagacgcgccgagacagaacttaatgggcccgctaacagcgcgatttgctggtgacccaatgcgaccagatgctccacgcccagtcgcgtaccgtcttcatgggagaaaataatactgttgatgggtgtctggtcagagacatcaagaaataacgccggaacattagtgcaggcagcttccacagcaatggcatcctggtcatccagcggatagttaatgatcagcccactgacgcgttgcgcgagaagattgtgcaccgccgctttacaggcttcgacgccgcttcgttctaccatcgacaccaccacgctggcacccagttgatcggcgcgagatttaatcgccgcgacaatttgcgacggcgcgtgcagggccagactggaggtggcaacgccaatcagcaacgactgtttgcccgccagttgttgtgccacgcggttgggaatgtaattcagctccgccatcgccgcttccactttttcccgcgttttcgcagaaacgtggctggcctggttcaccacgcgggaaacggtctgataagagacaccggcatactctgcgacatcgtataacgttactggtttcacattcaccaccctgaattgactctcttccgggcgctatcatgccataccgcgaaaggttttgcgccattcgatggtgtccgggatctcgacgctctcccttatgcgactcctgcattaggaagcagcccagtagtaggttgaggccgttgagcaccgccgccgcaaggaatggtgcatgcaaggagatggcgcccaacagtcccccggccacggggcctgccaccatacccacgccgaaacaagcgctcatgagcccgaagtggcgagcccgatcttccccatcggtgatgtcggcgatataggcgccagcaaccgcacctgtggcgccggtgatgccggccacgatgcgtccggcgtagaggatcgagatctcgatcccgcgaaattaatacgactcactataggggaattgtgagcggataacaattcccctctagaaataattttgtttaactttaagaaggagatatacatatgaactttcagccgtttttccagaaatttgttcatctgtatccgattagcaaaaccctgcgttttgaactgattccgcagggtgcaacccagaaatttattagcgaaaaacaggttctgctgcaggatgaaattcgtgcacgtaaatatccggaaatgaaacaggcaattgatggttatcataaagattttattcagcgtgcactgagcaatattgatagccaggtttttgaacaggcactgaatacctttgaagatctgtttctgcgtagccaggcagaacgtgcaaccgatgcatataagaaagatttcgaaaccgcacagaccaaactgcgtgaactgattgttcatagctttgaaaaaggtgaatttaagcaggaatataagagcctgtttgataaaaatctgattaccaatctgctgaaaccgtgggttgaacagcagaatcagattggtgatagcaactatacctatcatgaagattttaacaaatttaccacctattttctgggttttcatgaaaatcgcaagaatatttatagcaaagatccgcataaaaccgcactggcatatcgtctgattcatgaaaatttaccgaagttcctggaaaataacaagattctgctgaaaattcaaaatgatcatccgagcctgtgggaacagctgcagaccctgaatcagaccatgccgcagctgtttgatggttgggattttagccagctgatgcaggttagcttttttagcaataccctgacccagaccggtattgatcagtataataccattattggtggtattagcgaaggtgaaaatcgtcagaaaattcagggtattaatgagctgattaacctgtataatcagaaacaggataaaaaaaatcgtgttgcaaaactgaagcagctgtataaacagattctgagcgatcgtagcaccctgagctttctgccggaaaaatttgttgatgataccgaactgtatcatgcaattaatatgttttacctggaacatctgcatcatcagagcatgattaatggtcatagctataccctgctggaacgtgttcagctgctgattaatgaactggcaaattatgatctgagcaaagtttatctggcaccgaatcagctgagcaccgttagccatcagatgtttggtgattttggttatatcggtcgtgccctgaattattattatatgcaggttattcagccggattatgaacagctgctggcaagcgcaaaaaccaccaaaaaaattgaagcaaccgaaaagctgaaaacaattttcctggataccccgcagagcctggttgttattcaggcagcaattgatgaatatattcagctgcagccgagcaccaaaccgcatacccagctgaccgattttattattagcctgctgaaacagtatgaaaccgttgcagatgatcagagcattaaagttattaatgtttttagcgatattgagggtaagtatagctgtatcaaaggtctggttaataccaaaagcgaaagcaaacgtgaagttttacaggatgaaaaactggcaaccgatattaaggccttcatggatgcagtgaataatgttattaaactgctgaagccgtttagcctgaatgaaaagctggttgcaagcgttgaaaaagatgcacgtttttatagcgattttgaagaaatttatcagtctctgctgatttttgttccgctgtataataaagttcgtaattatattacccagaaaccgtatagcaccgaaaaatttaaactgaatttcaataagccgaccctgctgagcggttgggatgcaaataaagaagcagataatctgagcattctgctgcgtaaaaatggtaattattacctggcaattatggataccgcaaaaggtgcaaacaaagcatttgaaccgaagaccttaaatcagctgaaagttgatgatacaaccgattgttatgaaaagatggtttataaactgctgtcaggtccgagcaaaatgtttccgaaagcatttaaagcaaaaaataacgagggtaattattatccgaccccggaactgctgaccagctataataataacgaacacctgaaaaatgataaaaactttaccctggcaagcctgcatgcatatattgattggtgtaaagagtatattaatcgtaacccgagctggcatcagtttaattttaaatttagcccgacccagagctttcaggatattagccagttttatagcgaagttagcagccagagctataaagttcattttcagaccattccgagcgattatattgatcagctggttgcagaaggtaaactgtatctgtttcagatttataataaagatttcagcccgaatgcaaaaggtaaggaaaatctgcataccctgtattttaaagcactgtttagcgatgaaaatttaaaacagccggtttttaaactgagcggtgaagcagaaatgttttatcgtccggcaagcttacagctggcaaataccaccattcataaagcaggtgaaccgatggcagcaaaaaatccgctgaccccgaatgcaacccgtaccctggcatatgatattattaaagatcgtcgttttaccaccgataaatatctgctgcatgttccgattagcctgaattttcatgcacaggaaagcatgagcattaagaaacataatgatctggttcgtcagatgattaaacataatcatcaggatctgcatgttattggtattgatcgtggtgaaaaacatctgctgtatgttagcgttattgatctgaaaggtaatattgtttaccaggaaagcctgaatagcattaagagcgaagcacagaattttgaaaccccgtatcatcagctgctgcagcatcgtgaagaaggtcgtgcacaggcacgtaccgcatggggtaaaatcgaaaatattaaagaactgaaagatggttacctgagccaggttgttcatcgtattcagcagctgattctgaaatacaatgcaattgttatgctggaagacctgaattttggttttaaacgtggtcgttttaaaatcgagaaacagatttatcagaaatttgaaaaggccctgattcataaactgaattatgttgttgataaaagcacccaggcagatgaactgggtggtgttcgtaaagcatatcagctgaccgcaccgtttgaaagctttgaaaagctgggtaaacagagcggtgttctgttttatgttccggcatggaataccagcaaaattgatccggttaccggttttgttgatctgttaaaaccgaaatatgaaaatctggataaagcacaggcattttttaatgcatttgacagcattcattacaatgcacagaaaaactactttgagttcaaagtgaatctgaaacaatttgcaggtctgaaagcacaggccgcacaggcagaatggaccatttgtagctatggtgatgaacgtcatgtttatcagaaaaaaaatgcacagcagggtgaaaccgttattgttaacgtgaccgaagaattaaaagttctgtttgcaaaaaataatattgaagttgcccagagcgttgaactgaaagaaaccatttgtacccagacccaggttgatttttttaaacgtctgatgtggctgctgcaggttctgttagcactgcgttatagcagcagcaaagataaactggattatattctgagcccggttgcaaatgcacagggtgaattttttgatagccgtcatgcaagcgttcagctgccgcaggatagcgatgcaaatggtgcatatcatattgcactgaaaggtctgtgggttattgaacagctgaaagcagcagataatttagataaggttaaactggcaattagcaatgatgattggctgcattttgcacagcagaaaccttatctggcaaaacgtccggcagcgactaagaaggcggggcaagctaagaagaaaaaggggtcgggtcctgctgccaagagggtcaagttggacggcagtggtcatcaccatcatcatcattaacgaattcgagctccgtcgacaagcttgcggccgcactcgagcaccaccaccaccaccactgagatccggctgctaacaaagcccgaaaggaagctgagttggctgctgccaccgctgagcaataactagcataaccccttggggcctctaaacgggtcttgaggggttttttgctgaaaggaggaactatatccggattggcgaatgggacgcgccctgtagcggcgcattaagcgcggcgggtgtggtggttacgcgcagcgtgaccgctacacttgccagcgccctagcgcccgctcctttcgctttcttcccttcctttctcgccacgttcgccggctttccccgtcaagctctaaatcgggggctccctttagggttccgatttagtgctttacggcacctcgaccccaaaaaacttgattagggtgatggttcacgtagtgggccatcgccctgatagacggtttttcgccctttgacgttggagtccacgttctttaatagtggactcttgttccaaactggaacaacactcaaccctatctcggtctattcttttgatttataagggattttgccgatttcggcctattggttaaaaaatgagctgatttaacaaaaatttaacgcgaattttaacaaaatattaacgtttacaatttcaggtggcacttttcggggaaatgtgcgcggaacccctatttgtttatttttctaaatacattcaaatatgtatccgctcatgagacaataaccctgataaatgcttcaataatattgaaaaaggaagagtatgagtattcaacatttccgtgtcgcccttattcccttttttgcggcattttgccttcctgtttttgctcacccagaaacgctggtgaaagtaaaagatgctgaagatcagttgggtgcacgagtgggttacatcgaactggatctcaacagcggtaagatccttgagagttttcgccccgaagaacgttttccaatgatgagcacttttaaagttctgctatgtggcgcggtattatcccgtattgacgccgggcaagagcaactcggtcgccgcatacactattctcagaatgacttggttgagtactcaccagtcacagaaaagcatcttacggatggcatgacagtaagagaattatgcagtgctgccataaccatgagtgataacactgcggccaacttacttctgacaacgatcggaggaccgaaggagctaaccgcttttttgcacaacatgggggatcatgtaactcgccttgatcgttgggaaccggagctgaatgaagccataccaaacgacgagcgtgacaccacgatgcctgcagcaatggcaacaacgttgcgcaaactattaactggcgaactacttactctagcttcccggcaacaattaatagactggatggaggcggataaagttgcaggaccacttctgcgctcggcccttccggctggctggtttattgctgataaatctggagccggtgagcgtgggtctcgcggtatcattgcagcactggggccagatggtaagccctcccgtatcgtagttatctacacgacggggagtcaggcaactatggatgaacgaaatagacagatcgctgagataggtgcctcactgattaagcattggtaactgtcagaccaagtttactcatatatactttagattgatttaaaacttcatttttaatttaaaaggatctaggtgaagatcctttttgataatctcatgaccaaaatcccttaacgtgagttttcgttccactgagcgtcagaccccgtagaaaagatcaaaggatcttcttgagatcctttttttctgcgcgtaatctgctgcttgcaaacaaaaaaaccaccgctaccagcggtggtttgtttgccggatcaagagctaccaactctttttccgaaggtaactggcttcagcagagcgcagataccaaatactgtccttctagtgtagccgtagttaggccaccacttcaagaactctgtagcaccgcctacatacctcgctctgctaatcctgttaccagtggctgctgccagtggcgataagtcgtgtcttaccgggttggactcaagacgatagttaccggataaggcgcagcggtcgggctgaacggggggttcgtgcacacagcccagcttggagcgaacgacctacaccgaactgagatacctacagcgtgagctatgagaaagcgccacgcttcccgaagggagaaaggcggacaggtatccggtaagcggcagggtcggaacaggagagcgcacgagggagcttccagggggaaacgcctggtatctttatagtcctgtcgggtttcgccacctctgacttgagcgtcgatttttgtgatgctcgtcaggggggcggagcctatggaaaaacgccagcaacgcggcctttttacggttcctgg

SEQ ID NO: 813 - DNA, 11719 bp, synthetic construct
  misc_feature 1..11719: note = pReceiver-EF1a-GIG17 Plasmid
  source 1..11719: mol_type = other DNA
agtaaacttggtctgacagttaccaatgcttaatcagtgaggcacctatctcagcgatctgtctatttcgttcatccatagttgcctgactccccgtcgtgtagataactacgatacgggagggcttaccatctggccccagtgctgcaatgataccgcgagacccacgctcaccggctccagatttatcagcaataaaccagccagccggaagggccgagcgcagaagtggtcctgcaactttatccgcctccatccagtctattaattgttgccgggaagctagagtaagtagttcgccagttaatagtttgcgcaacgttgttgccattgctacaggcatcgtggtgtcacgctcgtcgtttggtatggcttcattcagctccggttcccaacgatcaaggcgagttacatgatcccccatgttgtgcaaaaaagcggttagctccttcggtcctccgatcgttgtcagaagtaagttggccgcagtgttatcactcatggttatggcagcactgcataattctcttactgtcatgccatccgtaagatgcttttctgtgactggtgagtactcaaccaagtcattctgagaatagtgtatgcggcgaccgagttgctcttgcccggcgtcaatacgggataataccgcgccacatagcagaactttaaaagtgctcatcattggaaaacgttcttcggggcgaaaactctcaaggatcttaccgctgttgagatccagttcgatgtaacccactcgtgcacccaactgatcttcagcatcttttactttcaccagcgtttctgggtgagcaaaaacaggaaggcaaaatgccgcaaaaaagggaataagggcgacacggaaatgttgaatactcatactcttcctttttcaatattattgaagcatttatcagggttattgtctcatgagcggatacatatttgaatgtatttagaaaaataaacaaataggggttccgcgcacatttccccgaaaagtgccacctgacgtcgacggatcgggagatcaacttgtttattgcagcttataatggttacaaataaagcaatagcatcacaaatttcacaaataaagcatttttttcactgcattctagttgtggtttgtccaaactcatcaatgtatcttatcatgtctggatcaactggataactcaagctaaccaaaatcatcccaaacttcccaccccataccctattaccactgccaattaccctgtggcgcaattaaccctcactaaagggaacaaaagctggagctgcaagcttaatgtagtcttatgcaatactcttgtagtcttgcaacatggtaacgatgagttagcaacatgccttacaaggagagaaaaagcaccgtgcatgccgattggtggaagtaaggtggtacgatcgtgccttattaggaaggcaacagacgggtctgacatggattggacgaaccactgaattgccgcattgcagagatattgtatttaagtgcctagctcgatacataaacgggtctctctggttagaccagatctgagcctgggagctctctggctaactagggaacccactgcttaagcctcaataaagcttgccttgagtgcttcaagtagtgtgtgcccgtctgttgtgtgactctggtaactagagatccctcagacccttttagtcagtgtggaaaatctctagcagtggcgcccgaacagggacttgaaagcgaaagggaaaccagaggagctctctcgacgcaggactcggcttgctgaagcgcgcacggcaagaggcgaggggcggcgactggtgagtacgccaaaaattttgactagcggaggctagaaggagagagatgggtgcgagagcgtcagtattaagcgggggagaattagatcgcgatgggaaaaaattcggttaaggccagggggaaagaaaaaatataaattaaaacatatagtatgggcaagcagggagctagaacgattcgcagttaatcctggcctgttagaaacatcagaaggctgtagacaaatactgggacagctacaaccatcccttcagacaggatcagaagaacttagatcattatataatacagtagcaaccctctattgtgtgcatcaaaggatagagataaaagacaccaaggaagctttagacaagatagaggaagagcaaaacaaaagtaagaccaccgcacagcaagcggccggccgctgatcttcagacctggaggaggagatatgagggacaattaattggagaagtgaattatataaatataaagtagtaaaaattgaaccattaggagtagcacccaccaaggcaaagagaagagtggtgcagagagaaaaaagagcagtgggaataggagctttgttccttgggttcttgggagcagcaggaagcactatgggcgcagcgtcaatgacgctgacggtacaggccagacaattattgtctggtatagtgcagcagcagaacaatttgctgagggctattgaggcgcaacagcatctgttgcaactcacagtctggggcatcaagcagctccaggcaagaatcctggctgtggaaagatacctaaaggatcaacagctcctggggatttggggttgctctggaaaactcatttgcaccactgctgtgccttggaatgctagttggagtaataaatctctggaacagatttggaatcacacgacctggatggagtgggacagagaaattaacaattacacaagcttaatacactccttaattgaagaatcgcaaaaccagcaagaaaagaatgaacaagaattattggaattagataaatgggcaagtttgtggaattggtttaacataacaaattggctgtggtatataaaattattcataatgatagtaggaggcttggtaggtttaagaatagtttttgctgtactttctatagtgaatagagttaggcagggatattcaccattatcgtttcagacccacctcccaaccccgaggggacccgacaggcccgaaggaatagaagaagaaggtggagagagagacagagacagatccattcgattagtgaacggatctcgacggtatcgcctttaaaagaaaaggggggattggggggtacagtgcaggggaaagaatagtagacataatagcaacagacatacaaactaaagaattacaaaaacaaattacaaaaattcaaaattttcgggtttattacagggacagcagagatccagtttatctaatacgactcactatagggagagagagagaattaccctcactaaagggaggagaagcatgaattcttgggggagtaattcatacaaaaggactcgcccctgccttggggaatcccagggaccgtcgttaaactcccactaacgtagaacccagagatcgctgcgttcccgccccctcacccgcccgctctcgtcatcactgaggtggagaagagcatgcgtgaggctccggtgcccgtcagtgggcagagcgcacatcgcccacagtccccgagaagttggggggaggggtcggcaattgaaccggtgcctagagaaggtggcgcggggtaaactgggaaagtgatgtcgtgtactggctccgcctttttcccgagggtgggggagaaccgtatataagtgcagtagtcgccgtgaacgttctttttcgcaacgggtttgccgccagaacacaggtaagtgccgtgtgtggttcccgcgggcctggcctctttacgggttatggcccttgcgtgccttgaattacttccacgcccctggctgcagtacgtgattcttgatcccgagcttcgggttggaagtgggtgggagagttcgaggccttgcgcttaaggagccccttcgcctcgtgcttgagttgaggcctggcttgggcgctggggccgccgcgtgcgaatctggtggcaccttcgcgcctgtctcgctgctttcgataagtctctagccatttaaaatttttgatgacctgctgcgacgctttttttctggcaagatagtcttgtaaatgcgggccaagatctgcacactggtatttcggtttttggggccgcgggcggcgacggggcccgtgcgtcccagcgcacatgttcggcgaggcggggcctgcgagcgcggccaccgagaatcggacgggggtagtctcaagctggccggcctgctctggtgcctggcctcgcgccgccgtgtatcgccccgccctgggcggcaaggctggcccggtcggcaccagttgcgtgagcggaaagatggccgcttcccggccctgctgcagggagctcaaaatggaggacgcggcgctcgggagagcgggcgggtgagtcacccacacaaaggaaaagggcctttccgtcctcagccgtcgcttcatgtgactccacggagtaccgggcgccgtccaggcacctcgattagttctcgagcttttggagtacgtcgtctttaggttggggggaggggttttatgcgatggagtttccccacactgagtgggtggagactgaagttaggccagcttggcacttgatgtaattctccttggaatttgccctttttgagtttggatcttggttcattctcaagcctcagacagtggttcaaagtttttttcttccatttcaggtgtcgtgaactagaagctttattgcggtagtttatcacagttaaattgctaacgcagtcagtgcttctgacacaacagtctcggccgccaccatgaatttccaacctttctttcagaaattcgtgcacctctatcctatctccaagactttaagatttgagcttatcccgcagggagcaactcagaaattcatttccgagaagcaggtcttactccaagacgagattagggccagaaagtacccagaaatgaaacaggcaattgacggctaccacaaggatttcatacagcgggcacttagcaacatcgacagccaggtcttcgaacaagctctgaacaccttcgaagacctttttctcagatctcaggccgaaagggccacagatgcttataaaaaagactttgagaccgcccagacaaagctgcgggagttgattgtgcactcctttgaaaagggcgagtttaagcaggagtataaaagcctctttgataaaaacttaataactaacctgctgaagccttgggtggaacaacagaatcagatcggcgactccaactatacgtaccacgaggactttaataagtttacaacatatttccttggtttccacgaaaatcggaaaaacatatacagcaaggacccccacaagaccgcactggcttaccggttgatacatgagaacctgcctaagtttttagagaacaataagattttgcttaaaatccaaaacgatcaccccagcttgtgggagcaactgcagaccctgaatcagacaatgccgcagttgttcgacggttgggacttttcccaactcatgcaagtctccttcttctccaacacgttgactcagaccggcatagaccagtacaataccattattggcggtatctccgagggggagaaccggcagaaaatccaggggatcaatgagcttatcaacctttacaatcaaaagcaggacaaaaagaaccgagttgctaagctcaagcagttgtacaaacagattctgtcagataggagcactctttctttcctgcctgaaaagtttgtggacgatacagagctctaccacgctattaacatgttttacctggaacatctccaccatcagtccatgatcaacggtcacagttataccctgttggaaagagtgcagttgctgataaatgaactggctaattacgatctcagtaaggtttacttagcccctaaccaattgtccacagtaagccaccagatgtttggagacttcggctacataggcagagctctgaattattattacatgcaggtgatccaaccagactatgagcagctgcttgcatccgctaagacaaccaagaaaatagaggcgaccgaaaaattgaaaaccatctttttagacacaccacagtcactcgttgtaatccaggcagctattgacgagtacatccagttacagccttctaccaagcctcacacacagttgactgactttataatttctctcctgaaacagtatgaaacagtcgccgacgatcagagcatcaaagtcattaatgtgttctcagacatcgagggaaagtacagctgtatcaaggggctcgtgaacaccaagagtgagtctaaaagagaggttctccaggatgagaaacttgcgacagacattaaggccttcatggatgctgtgaataatgtcataaaactgctgaagcccttcagcctgaatgaaaaattggtagcatccgtggagaaagacgctaggttttactctgattttgaggagatttatcagtccctgttaatatttgtgccactttataacaaggtccggaactacattactcagaagccttactctactgagaagtttaagttaaattttaataagcctaccctcctttccggctgggacgccaataaggaggcagacaatctgtccattcttttacgcaaaaacggaaattactacctggccattatggacaccgcaaagggagctaacaaagccttcgagcctaagaccttgaaccagttgaaggtggatgataccacggactgttacgaaaagatggtctataaattacttagtggtccaagcaaaatgttccccaaagctttcaaggcaaagaacaacgagggaaattactatcctacccccgagttgctgacttcttacaataacaacgaacacttgaagaatgacaaaaattttacattggcgtcactgcacgcttacatcgattggtgtaaggagtatattaacagaaatccttcctggcatcaattcaattttaagtttagtccaactcagagcttccaggacatcagtcagttttacagtgaggtatcttctcagagttataaggttcactttcaaacgattccctcagattatatcgaccagttggtcgcagaggggaaattgtatctgttccagatctacaacaaggacttctcaccaaacgccaagggaaaggaaaatttgcatacactgtatttcaaggcactcttctctgacgaaaatctcaagcagcccgtgtttaagctgagcggagaggccgaaatgttttatcggcccgcctctcttcagctggccaacaccactatccataaagcaggagaacccatggcggcaaagaacccacttactcctaacgccaccaggacattagcctacgatattatcaaggaccgtaggtttactactgataagtatctcctccatgtccctatcagcctgaactttcatgctcaggaaagcatgagtatcaaaaagcataacgacctcgtgcgccagatgattaaacataaccaccaagatctgcatgtgatcgggattgacaggggtgagaagcacctgctctatgtgagcgtgattgatcttaaggggaacatcgtttatcaggagtccctgaactccatcaaatctgaggcacaaaacttcgagacaccctaccaccaactcctccagcacagagaggagggaagagcacaggcccggactgcatggggcaagattgagaatattaaggaactgaaggacggctatctctcacaggtggtgcatagaatacaacagctgatattgaagtacaatgcaatcgtaatgctggaggatctgaacttcggatttaaacgtggcaggtttaagatcgaaaaacagatttatcagaagtttgaaaaggcacttatccacaagctgaattacgttgttgataagagtacccaagcagacgagttgggcggagtgcggaaagcataccagctgaccgctccctttgaaagcttcgaaaagctgggaaagcagagcggcgtgttgttctatgtgcccgcctggaacactagtaagatagacccggtgacagggttcgtggatctgctcaaacccaaatacgaaaatctggacaaggcgcaggcgttcttcaacgcattcgactccatccactacaacgctcagaagaattacttcgagtttaaagtaaatttgaagcagttcgcaggcctgaaagctcaggcagcccaggctgaatggacaatctgctcctacggcgacgagcgtcacgtgtatcagaaaaagaatgctcaacagggggaaacagtgatcgtcaacgttacagaggaactcaaggtgttgtttgcaaagaacaacatcgaggtcgcacagtcagtcgagctgaaagagaccatctgtacccaaacacaggttgacttctttaagcggcttatgtggctgctgcaggtacttttggcattaaggtattcatcaagcaaggataagctcgactacatccttagccccgtggcaaacgcacaaggtgaattctttgacagccggcatgcttccgttcaactcccccaggactccgacgctaacggcgcttatcacattgcgctcaaggggctctgggtgatcgaacaattgaaagccgctgacaaccttgacaaagtgaaactggctatcagcaatgatgattggctgcattttgctcagcaaaagccatatctggctaaacgtccggcagcgactaagaaggcggggcaagctaagaagaaaaaggggtcgggtcctgctgccaagagggtcaagttggacggcagtggtcatcaccatcatcatcatggcagcggcgcgaccaactttagcctgctgaaacaggcgggcgatgtggaagaaaacccaggaccgatgaccgagtacaagcccacggtgcgcctcgccacccgcgacgacgtcccccgggccgtacgcaccctcgccgccgcgttcgccgactaccccgccacgcgccacaccgtcgacccggaccgccacatcgagcgggtcaccgagctgcaagaactcttcctcacgcgcgtcgggctcgacatcggcaaggtgtgggtcgcggacgacggcgccgcggtggcggtctggaccacgccggagagcgtcgaagcgggggcggtgttcgccgagatcggcccgcgcatggccgagttgagcggttcccggctggccgcgcagcaacagatggaaggcctcctggcgccgcaccggcccaaggagcccgcgtggttcctggccaccgtcggcgtctcgcccgaccaccagggcaagggtctgggcagcgccgtcgtgctccccggagtggaggcggccgagcgcgccggggtgcccgccttcctggagacctccgcgccccgcaacctccccttctacgagcggctcggcttcaccgtcaccgccgacgtcgaggtgcccgaaggaccgcgcacctggtgcatgacccgcaagcccggtgcctagacgcgtctggaacaatcaacctctggattacaaaatttgtgaaagattgactggtattcttaactatgttgctccttttacgctatgtggatacgctgctttaatgcctttgtatcatgctattgcttcccgtatggctttcattttctcctccttgtataaatcctggttgctgtctctttatgaggagttgtggcccgttgtcaggcaacgtggcgtggtgtgcactgtgtttgctgacgcaacccccactggttggggcattgccaccacctgtcagctcctttccgggactttcgctttccccctccctattgccacggcggaactcatcgccgcctgccttgcccgctgctggacaggggctcggctgttgggcactgacaattccgtggtgttgtcggggaagctgacgtcctttccatggctgctcgcctgtgttgccacctggattctgcgcgggacgtccttctgctacgtcccttcggccctcaatccagcggaccttccttcccgcggcctgctgccggctctgcggcctcttccgcgtcttcgccttcgccctcagacgagtcggatctccctttgggccgcctccccgcctggaattaattctgcagtcgagacctagaaaaacatggagcaatcacaagtagcaatacagcagctaccaatgctgattgtgcctggctagaagcacaagaggaggaggaggtgggttttccagtcacacctcaggacctttaagaccaatgacttacaaggcagctgtagatcttagccactttttaaaagaaaagaggggactggaagggctaattcactcccaacgaagacaagatctgctttttgcctgtactgggtctctctggttagaccagatctgagcctgggagctctctggctaactagggaacccactgcttaagcctcaataaagcttgccttgagtgcttcaagtagtgtgtgcccgtctgttgtgtgactctggtaactagagatccctcagacccttttagtcagtgtggaaaatctctagcagtagtagttcatgtcatcttattattcagtatttataacttgcaaagaaatgaatatcagagagtgagaggctaacgttttaccgtcgacctctagctagagcttggcgtaatcatggtcatagctgtttcctgtgtgaaattgttatccgctcacaattccacacaacatacgagccggaagcataaagtgtaaagcctggggtgcctaatgagtgagctaactcacattaattgcgttgcgctcactgcccgctttccagtcgggaaacctgtcgtgccagctgcattaatgaatcggccaacgcgcggggagaggcggtttgcgtattgggcgctcttccgcttcctcgctcactgactcgctgcgctcggtcgttcggctgcggcgagcggtatcagctcactcaaaggcggtaatacggttatccacagaatcaggggataacgcaggaaagaacatgtgagcaaaaggccagcaaaaggccaggaaccgtaaaaaggccgcgttgctggcgtttttccataggctccgcccccctgacgagcatcacaaaaatcgacgctcaagtcagaggtggcgaaacccgacaggactataaagataccaggcgtttccccctggaagctccctcgtgcgctctcctgttccgaccctgccgcttaccggatacctgtccgcctttctcccttcgggaagcgtggcgctttctcatagctcacgctgtaggtatctcagttcggtgtaggtcgttcgctccaagctgggctgtgtgcacgaaccccccgttcagcccgaccgctgcgccttatccggtaactatcgtcttgagtccaacccggtaagacacgacttatcgccactggcagcagccactggtaacaggattagcagagcgaggtatgtaggcggtgctacagagttcttgaagtggtggcctaactacggctacactagaagaacagtatttggtatctgcgctctgctgaagccagttaccttcggaaaaagagttggtagctcttgatccggcaaacaaaccaccgctggtagcggtttttttgtttgcaagcagcagattacgcgcagaaaaaaaggatctcaagaagatcctttgatcttttctacggggtctgacgctcagtggaacgaaaactcacgttaagggattttggtcatgagattatcaaaaaggatcttcacctagatccttttaaattaaaaatgaagttttaaatcaatctaaagtatatatg

SEQ ID NO: 814 - DNA, 7456 bp, synthetic construct
  misc_feature 1..7456: note = T7p14-GIG17 Plasmid
  source 1..7456: mol_type = other DNA
ctcagcgatctgtctatttcgttcatccatagttgcctgactccccgtcgtgtagataactacgatacgggagggcttaccatctggccccagtgctgcaatgataccgcgagacccacgctcaccggctccagatttatcagcaataaaccagccagccggaagggccgagcgcagaagtggtcctgcaactttatccgcctccatccagtctattaattgttgccgggaagctagagtaagtagttcgccagttaatagtttgcgcaacgttgttgccattgctacaggcatcgtggtgtcacgctcgtcgtttggtatggcttcattcagctccggttcccaacgatcaaggcgagttacatgatcccccatgttgtgcaaaaaagcggttagctccttcggtcctccgatcgttgtcagaagtaagttggccgcagtgttatcactcatggttatggcagcactgcataattctcttactgtcatgccatccgtaagatgcttttctgtgactggtgagtactcaaccaagtcattctgagaatagtgtatgcggcgaccgagttgctcttgcccggcgtcaatacgggataataccgcgccacatagcagaactttaaaagtgctcatcattggaaaacgttcttcggggcgaaaactctcaaggatcttaccgctgttgagatccagttcgatgtaacccactcgtgcacccaactgatcttcagcatcttttactttcaccagcgtttctgggtgagcaaaaacaggaaggcaaaatgccgcaaaaaagggaataagggcgacacggaaatgttgaatactcatactcttcctttttcaatattattgaagcatttatcagggttattgtctcatgagcggatacatatttgaatgtatttagaaaaataaacaaataggggttccgcgcacatttccccgaaaagtgccacctgacgtctaagaaaccattattatcatgacattaacctataaaaataggcgtatcacgaggccctttcgtctcgcgcgtttcggtgatgacggtgaaaacctctgacacatgcagctcccggagacggtcacagcttgtctgtaagcggatgccgggagcagacaagcccgtcagggcgcgtcagcgggtgttggcgggtgtcggggctggcttaactatgcggcatcagagcagattgtactgagagtgcaccatatatgcggtgtgaaataccgcacagatgcgtaaggagaaaataccgcatcaggcgccattcgccattcaggctgcgcaactgttgggaagggcgatcggtgcgggcctcttcgctattacgccagctggcgaaagggggatgtgctgcaaggcgattaagttgggtaacgccagggttttcccagtcacgacgttgtaaaacgacggccagtgccaagcttgcatgcaaggagatggcgcccaacagtcccccggccacggggcctgccaccatacccacgccgaaacaagcgctcatgagcccgaagtggcgagcccgatcttccccatcggtgatgtcggcgatataggcgccagcaaccgcacctgtggcgccggtgatgccggccacgatgcgtccggcgtagaggatcgagatctcgatcccgcgaaattaatacgactcactatagggagaccacaacggtttccctctagaaataattttgtttaactttaagaaggagatatacatatgaactttcagccgtttttccagaaatttgttcatctgtatccgattagcaaaaccctgcgttttgaactgattccgcagggtgcaacccagaaatttattagcgaaaaacaggttctgctgcaggatgaaattcgtgcacgtaaatatccggaaatgaaacaggcaattgatggttatcataaagattttattcagcgtgcactgagcaatattgatagccaggtttttgaacaggcactgaatacctttgaagatctgtttctgcgtagccaggcagaacgtgcaaccgatgcatataagaaagatttcgaaaccgcacagaccaaactgcgtgaactgattgttcatagctttgaaaaaggtgaatttaagcaggaatataagagcctgtttgataaaaatctgattaccaatctgctgaaaccgtgggttgaacagcagaatcagattggtgatagcaactatacctatcatgaagattttaacaaatttaccacctattttctgggttttcatgaaaatcgcaagaatatttatagcaaagatccgcataaaaccgcactggcatatcgtctgattcatgaaaatttaccgaagttcctggaaaataacaagattctgctgaaaattcaaaatgatcatccgagcctgtgggaacagctgcagaccctgaatcagaccatgccgcagctgtttgatggttgggattttagccagctgatgcaggttagcttttttagcaataccctgacccagaccggtattgatcagtataataccattattggtggtattagcgaaggtgaaaatcgtcagaaaattcagggtattaatgagctgattaacctgtataatcagaaacaggataaaaaaaatcgtgttgcaaaactgaagcagctgtataaacagattctgagcgatcgtagcaccctgagctttctgccggaaaaatttgttgatgataccgaactgtatcatgcaattaatatgttttacctggaacatctgcatcatcagagcatgattaatggtcatagctataccctgctggaacgtgttcagctgctgattaatgaactggcaaattatgatctgagcaaagtttatctggcaccgaatcagctgagcaccgttagccatcagatgtttggtgattttggttatatcggtcgtgccctgaattattattatatgcaggttattcagccggattatgaacagctgctggcaagcgcaaaaaccaccaaaaaaattgaagcaaccgaaaagctgaaaacaattttcctggataccccgcagagcctggttgttattcaggcagcaattgatgaatatattcagctgcagccgagcaccaaaccgcatacccagctgaccgattttattattagcctgctgaaacagtatgaaaccgttgcagatgatcagagcattaaagttattaatgtttttagcgatattgagggtaagtatagctgtatcaaaggtctggttaataccaaaagcgaaagcaaacgtgaagttttacaggatgaaaaactggcaaccgatattaaggccttcatggatgcagtgaataatgttattaaactgctgaagccgtttagcctgaatgaaaagctggttgcaagcgttgaaaaagatgcacgtttttatagcgattttgaagaaatttatcagtctctgctgatttttgttccgctgtataataaagttcgtaattatattacccagaaaccgtatagcaccgaaaaatttaaactgaatttcaataagccgaccctgctgagcggttgggatgcaaataaagaagcagataatctgagcattctgctgcgtaaaaatggtaattattacctggcaattatggataccgcaaaaggtgcaaacaaagcatttgaaccgaagaccttaaatcagctgaaagttgatgatacaaccgattgttatgaaaagatggtttataaactgctgtcaggtccgagcaaaatgtttccgaaagcatttaaagcaaaaaataacgagggtaattattatccgaccccggaactgctgaccagctataataataacgaacacctgaaaaatgataaaaactttaccctggcaagcctgcatgcatatattgattggtgtaaagagtatattaatcgtaacccgagctggcatcagtttaattttaaatttagcccgacccagagctttcaggatattagccagttttatagcgaagttagcagccagagctataaagttcattttcagaccattccgagcgattatattgatcagctggttgcagaaggtaaactgtatctgtttcagatttataataaagatttcagcccgaatgcaaaaggtaaggaaaatctgcataccctgtattttaaagcactgtttagcgatgaaaatttaaaacagccggtttttaaactgagcggtgaagcagaaatgttttatcgtccggcaagcttacagctggcaaataccaccattcataaagcaggtgaaccgatggcagcaaaaaatccgctgaccccgaatgcaacccgtaccctggcatatgatattattaaagatcgtcgttttaccaccgataaatatctgctgcatgttccgattagcctgaattttcatgcacaggaaagcatgagcattaagaaacataatgatctggttcgtcagatgattaaacataatcatcaggatctgcatgttattggtattgatcgtggtgaaaaacatctgctgtatgttagcgttattgatctgaaaggtaatattgtttaccaggaaagcctgaatagcattaagagcgaagcacagaattttgaaaccccgtatcatcagctgctgcagcatcgtgaagaaggtcgtgcacaggcacgtaccgcatggggtaaaatcgaaaatattaaagaactgaaagatggttacctgagccaggttgttcatcgtattcagcagctgattctgaaatacaatgcaattgttatgctggaagacctgaattttggttttaaacgtggtcgttttaaaatcgagaaacagatttatcagaaatttgaaaaggccctgattcataaactgaattatgttgttgataaaagcacccaggcagatgaactgggtggtgttcgtaaagcatatcagctgaccgcaccgtttgaaagctttgaaaagctgggtaaacagagcggtgttctgttttatgttccggcatggaataccagcaaaattgatccggttaccggttttgttgatctgttaaaaccgaaatatgaaaatctggataaagcacaggcattttttaatgcatttgacagcattcattacaatgcacagaaaaactactttgagttcaaagtgaatctgaaacaatttgcaggtctgaaagcacaggccgcacaggcagaatggaccatttgtagctatggtgatgaacgtcatgtttatcagaaaaaaaatgcacagcagggtgaaaccgttattgttaacgtgaccgaagaattaaaagttctgtttgcaaaaaataatattgaagttgcccagagcgttgaactgaaagaaaccatttgtacccagacccaggttgatttttttaaacgtctgatgtggctgctgcaggttctgttagcactgcgttatagcagcagcaaagataaactggattatattctgagcccggttgcaaatgcacagggtgaattttttgatagccgtcatgcaagcgttcagctgccgcaggatagcgatgcaaatggtgcatatcatattgcactgaaaggtctgtgggttattgaacagctgaaagcagcagataatttagataaggttaaactggcaattagcaatgatgattggctgcattttgcacagcagaaaccttatctggcaaaacgtccggcagcgactaagaaggcggggcaagctaagaagaaaaagggtagcggacctgctgccaagagggtcaagttggacggcagcggcctcgagtgaccttaggagatccggctgctaacaaagcccgaaaggaagctgagttggctgctgccaccgctgagcaataactagcataaccccttggggcctctaaacgggtcttgaggggttttttgctgaaaggaggaactatatccggatatccacaggacgggtgtggtcgccatgatcgcgtagtcgatagtggctccaagtagcgaagcgagcaggactgggcggcggccaaagcggtcggacagtgctccgagaacgggtgcgcatagaaattgcatcaacgcatatagcgctagcagcacgccatagtgactggcgatgctgtcggaatggacgatatcccgcaagaggcccggcagtaccggcataaccaagcctatgcctacagcatccagggtgacggtgccgaggatgacgatgagcgcattgttagatttcatacacggtgcctgactgcgttagcaatttaactgtgataaactaccgcattaaagcttatcgatgataagctgtcaaacatgagaattcgtaatcatgtcatagctgtttcctgtgtgaaattgttatccgctcacaattccacacaacatacgagccggaagcataaagtgtaaagcctggggtgcctaatgagtgagctaactcacattaattgcgttgcgctcactgcccgctttccagtcgggaaacctgtcgtgccagctgcattaatgaatcggccaacgcgcggggagaggcggtttgcgtattgggcgctcttccgcttcctcgctcactgactcgctgcgctcggtcgttcggctgcggcgagcggtatcagctcactcaaaggcggtaatacggttatccacagaatcaggggataacgcaggaaagaacatgtgagcaaaaggccagcaaaaggccaggaaccgtaaaaaggccgcgttgctggcgtttttccataggctccgcccccctgacgagcatcacaaaaatcgacgctcaagtcagaggtggcgaaacccgacaggactataaagataccaggcgtttccccctggaagctccctcgtgcgctctcctgttccgaccctgccgcttaccggatacctgtccgcctttctcccttcgggaagcgtggcgctttctcatagctcacgctgtaggtatctcagttcggtgtaggtcgttcgctccaagctgggctgtgtgcacgaaccccccgttcagcccgaccgctgcgccttatccggtaactatcgtcttgagtccaacccggtaagacacgacttatcgccactggcagcagccactggtaacaggattagcagagcgaggtatgtaggcggtgctacagagttcttgaagtggtggcctaactacggctacactagaaggacagtatttggtatctgcgctctgctgaagccagttaccttcggaaaaagagttggtagctcttgatccggcaaacaaaccaccgctggtagcggtggtttttttgtttgcaagcagcagattacgcgcagaaaaaaaggatctcaagaagatcctttgatcttttctacggggtctgacgctcagtggaacgaaaactcacgttaagggattttggtcatgagattatcaaaaaggatcttcacctagatccttttaaattaaaaatgaagttttaaatcaatctaaagtatatatgagtaaacttggtctgacagttaccaatgcttaatcagtgaggcacctat

SEQ ID NO: 815 - protein, 22 aa, synthetic construct
  REGION 1..22: note = Consensus sequence
  VARIANT 4: note = misc_feature - Any amino acid
  VARIANT 21: note = misc_feature - Any amino acid
EEVXKDNNFYAELEEIYDELXP

SEQ ID NO: 816 - protein, 10 aa, synthetic construct
  REGION 1..10: note = Consensus sequence
  VARIANT 10: note = misc_feature - Any amino acid
SKNFDIKFCX

SEQ ID NO: 817 - protein, 16 aa, synthetic construct
  REGION 1..16: note = Consensus sequence
  VARIANT 7: note = misc_feature - Any amino acid
CIAKHPXWKNFGFKFS

SEQ ID NO: 818 - protein, 20 aa, synthetic construct
  REGION 1..20: note = Consensus sequence
  VARIANT 6: note = misc_feature - Any amino acid
  VARIANT 19: note = misc_feature - Any amino acid
EENLKXIVLKLNGEAELFXR

SEQ ID NO: 819 - protein, 5 aa, synthetic construct
  REGION 1..5: note = Consensus sequence
KSSIK

SEQ ID NO: 820 - protein, 12 aa, synthetic construct
  REGION 1..12: note = Consensus sequence
  VARIANT 2: note = misc_feature - Any amino acid
IXEQKSFNIVNG

SEQ ID NO: 821 - protein, 8 aa, synthetic construct
  REGION 1..8: note = Consensus sequence
YGFKRGRF

SEQ ID NO: 822 - protein, 27 aa, synthetic construct
  REGION 1..27: note = Consensus sequence
  VARIANT 27: note = misc_feature - Any amino acid
KVERQVYQKFETMLINKLNYLVFKDRX

SEQ ID NO: 823 - protein, 7 aa, synthetic construct
  REGION 1..7: note = Consensus sequence
MEQALSN

SEQ ID NO: 824 - protein, 5 aa, synthetic construct
  REGION 1..5: note = Consensus sequence
LLYND

SEQ ID NO: 825 - protein, 39 aa, synthetic construct
  REGION 1..39: note = Consensus sequence
  VARIANT 10: note = misc_feature - Any amino acid
  VARIANT 23: note = misc_feature - Any amino acid
  VARIANT 35: note = misc_feature - Any amino acid
DAQWFKWYDXVRNYLTKKPQDDXKENKLKLNFDNXSLLG

SEQ ID NO: 826 - protein, 7 aa, synthetic construct
  REGION 1..7: note = Consensus sequence
IFDTSKE

SEQ ID NO: 827 - protein, 16 aa, synthetic construct
  REGION 1..16: note = Consensus sequence
LKFQTLAGKGFKGENG

SEQ ID NO: 828 - protein, 12 aa, synthetic construct
  REGION 1..12: note = Consensus sequence
ERYVSKYPLLEE

SEQ ID NO: 829 - protein, 8 aa, synthetic construct
  REGION 1..8: note = Consensus sequence
GSKHQLCA

SEQ ID NO: 830 - protein, 12 aa, synthetic construct
  REGION 1..12: note = Consensus sequence
  VARIANT 8: note = misc_feature - Any amino acid
GAEIFMRXPVAK

SEQ ID NO: 831 - protein, 60 aa, synthetic construct
  REGION 1..60: note = Consensus sequence
  VARIANT 12: note = misc_feature - Any amino acid
  VARIANT 36: note = misc_feature - Any amino acid
YQDIEGKKQFGXMLYTRANYTSVTDPATGWRKTIYXKNGKEEDIKKQILEKFSDFGFDGR

SEQ ID NO: 832 - protein, 58 aa, synthetic construct
  REGION 1..58: note = Consensus sequence
  VARIANT 17: note = misc_feature - Any amino acid
  VARIANT 42: note = misc_feature - Any amino acid
  VARIANT 46: note = misc_feature - Any amino acid
  VARIANT 55: note = misc_feature - Any amino acid
TWRLYSGKNGKPLPRFXNKKQLQQDKNIWVPEQVNVVEILDXLFAXFDKTKSFKXQIE

SEQ ID NO: 833 - protein, 6 aa, synthetic construct
  REGION 1..6: note = Consensus sequence
KLFQDY

SEQ ID NO: 834 - protein, 54 aa, synthetic construct
  REGION 1..54: note = Consensus sequence
  VARIANT 1..2: note = misc_feature - Any amino acid
  VARIANT 15: note = misc_feature - Any amino acid
  VARIANT 44: note = misc_feature - Any amino acid
  VARIANT 52: note = misc_feature - Any amino acid
XXTGWVDSKTEKSNXGTQFGGYLFRKKNEIGEYDYFLGISSKTXLFRKNEAXIG

SEQ ID NO: 835 - protein, 9 aa, synthetic construct
  REGION 1..9: note = Consensus sequence
IEDYFATLG

SEQ ID NO: 836 - protein, 29 aa, synthetic construct
  REGION 1..29: note = Consensus sequence
  VARIANT 1: note = misc_feature - Any amino acid
  VARIANT 12: note = misc_feature - Any amino acid
XTPLYNKVRNYXTRKPYSTEKIKLNFDNS

SEQ ID NO: 837 - protein, 10 aa, synthetic construct
  REGION 1..10: note = Consensus sequence
  VARIANT 1: note = misc_feature - Any amino acid
XCYEKMDYKL

SEQ ID NO: 838 - protein, 10 aa, synthetic construct
  REGION 1..10: note = Consensus sequence
LPGANKMLPK

SEQ ID NO: 839 - protein, 50 aa, synthetic construct
  REGION 1..50: note = Consensus sequence
  VARIANT 1: note = misc_feature - Any amino acid
  VARIANT 6: note = misc_feature - Any amino acid
  VARIANT 23..24: note = misc_feature - Any amino acid
  VARIANT 35: note = misc_feature - Any amino acid
XTYEDXSGFYREVEQQGYKLSFXXVSVSYIDQLVXEGKLYLFQIYNKDFS

SEQ ID NO: 840 - protein, 36 aa, synthetic construct
  REGION 1..36: note = Consensus sequence
  VARIANT 1: note = misc_feature - Any amino acid
  VARIANT 30: note = misc_feature - Any amino acid
  VARIANT 36: note = misc_feature - Any amino acid
XLGKQSGFLFYIPAWNTSKIDPVTGFVNLXDTRYEX

SEQ ID NO: 841 - protein, 56 aa, synthetic construct
  REGION 1..56: note = Consensus sequence
EDEKEVVASFKNFTTYFTGFFTNRKNMYSDEEKSTAIAYRCINENLPKFLDNVKAF

SEQ ID NO: 842 - protein, 25 aa, synthetic construct
  REGION 1..25: note = Consensus sequence
SDCYEKIIYKLLPGPNKMLPKVFFS

SEQ ID NO: 843 - protein, 11 aa, synthetic construct
  REGION 1..11: note = Consensus sequence
  VARIANT 9: note = misc_feature - Any amino acid
KNPLNDKKXST

SEQ ID NO: 844 - protein, 24 aa, synthetic construct
  REGION 1..24: note = Consensus sequence
  VARIANT 1: note = misc_feature - Any amino acid
  VARIANT 20: note = misc_feature - Any amino acid
XEKQVYQKFEKMLIDKLNYXVDKK

SEQ ID NO: 845 - protein, 6 aa, synthetic construct
HHHHHH

SEQ ID NO: 846 - protein, 1243 aa, synthetic construct
  VARIANT 1..4: note = Any amino acid
  VARIANT 8..9: note = Any amino acid
  VARIANT 14: note = Any amino acid
  VARIANT 16..17: note = Any amino acid
  VARIANT 28..29: note = Any amino acid
  VARIANT 33: note = Any amino acid
  VARIANT 38: note = Any amino acid
  VARIANT 40..41: note = Any amino acid
  VARIANT 50: note = Any amino acid
  VARIANT 52..53: note = Any amino acid
  VARIANT 55: note = Any amino acid
  VARIANT 57: note = Any amino acid
  VARIANT 61: note = Any amino acid
  VARIANT 63: note = Any amino acid
  VARIANT 66: note = Any amino acid
  VARIANT 68: note = Any amino acid
  VARIANT 72: note = Any amino acid
  VARIANT 77..78: note = Any amino acid
  VARIANT 85..86: note = Any amino acid
  VARIANT 89..90: note = Any amino acid
  VARIANT 92: note = Any amino acid
  VARIANT 94..95: note = Any amino acid
  VARIANT 106: note = Any amino acid
  VARIANT 111..112: note = Any amino acid
  VARIANT 119..120: note = Any amino acid
  VARIANT 122: note = Any amino acid
  VARIANT 128..129: note = Any amino acid
  VARIANT 134..136: note = Any amino acid
  VARIANT 138..140: note = Any amino acid
  VARIANT 145: note = Any amino acid
  VARIANT 148: note = Any amino acid
  VARIANT 152..153: note = Any amino acid
  VARIANT 157: note = Any amino acid
  VARIANT 159..161: note = Any amino acid
  VARIANT 168..169: note = Any amino acid
  VARIANT 172: note = Any amino acid
  VARIANT 176: note = Any amino acid
  VARIANT 180: note = Any amino acid
  VARIANT 185: note = Any amino acid
  VARIANT 187: note = Any amino acid
  VARIANT 189: note = Any amino acid
  VARIANT 194: note = Any amino acid
  VARIANT 197..198: note = Any amino acid
  VARIANT 201: note = Any amino acid
  VARIANT 204: note = Any amino acid
  VARIANT 206..207: note = Any amino acid
  VARIANT 209: note = Any amino acid
  VARIANT 213: note = Any amino acid
  VARIANT 218: note = Any amino acid
  VARIANT 220..222: note = Any amino acid
  VARIANT 228: note = Any amino acid
  VARIANT 230..231: note = Any amino acid
  VARIANT 234..235: note = Any amino acid
  VARIANT 237: note = Any amino acid
  VARIANT 240: note = Any amino acid
  VARIANT 251..252: note = Any amino acid
  VARIANT 254..255: note = Any amino acid
  VARIANT 262..263: note = Any amino acid
  VARIANT 266: note = Any amino acid
  VARIANT 268..269: note = Any amino acid
  VARIANT 271..272: note = Any amino acid
  VARIANT 283..284: note = Any amino acid
  VARIANT 291: note = Any amino acid
  VARIANT 293: note = Any amino acid
  VARIANT 303: note = Any amino acid
  VARIANT 307: note = Any amino acid
  VARIANT 312..313: note = Any amino acid
  VARIANT 318: note = Any amino acid
  VARIANT 324: note = Any amino acid
  VARIANT 326: note = Any amino acid
  VARIANT 328: note = Any amino acid
  VARIANT 330: note = Any amino acid
  VARIANT 332: note = Any amino acid
  VARIANT 339..340: note = Any amino acid
  VARIANT 342: note = Any amino acid
  VARIANT 344..345: note = Any amino acid
  VARIANT 350: note = Any amino acid
  VARIANT 353: note = Any amino acid
  VARIANT 355: note = Any amino acid
  VARIANT 359: note = Any amino acid
  VARIANT 363..364: note = Any amino acid
  VARIANT 366: note = Any amino acid
  VARIANT 368..370: note = Any amino acid
  VARIANT 377..378: note = Any amino acid
  VARIANT 386: note = Any amino acid
  VARIANT 388..389: note = Any amino acid
  VARIANT 392..393: note = Any amino acid
  VARIANT 395: note = Any amino acid
  VARIANT 400..401: note = Any amino acid
  VARIANT 403..405: note = Any amino acid
  VARIANT 409: note = Any amino acid
  VARIANT 412: note = Any amino acid
  VARIANT 416: note = Any amino acid
  VARIANT 419..421: note = Any amino acid
  VARIANT 423..424: note = Any amino acid
  VARIANT 431: note = Any amino acid
  VARIANT 433: note = Any amino acid
  VARIANT 442: note = Any amino acid
  VARIANT 444: note = Any amino acid
  VARIANT 447: note = Any amino acid
  VARIANT 450: note = Any amino acid
  VARIANT 454: note = Any amino acid
  VARIANT 459: note = Any amino acid
  VARIANT 462..463: note = Any amino acid
  VARIANT 468: note = Any amino acid
  VARIANT 485: note = Any amino acid
  VARIANT 487..488: note = Any amino acid
  VARIANT 493: note = Any amino acid
  VARIANT 524: note = Any amino acid
  VARIANT 535..536: note = Any amino acid
  VARIANT 538..539: note = Any amino acid
  VARIANT 549..551: note = Any amino acid
  VARIANT 561..562: note = Any amino acid
  VARIANT 569: note = Any amino acid
  VARIANT 580: note = Any amino acid
  VARIANT 582: note = Any amino acid
  VARIANT 591: note = Any amino acid
  VARIANT 598: note = Any amino acid
  VARIANT 605: note = Any amino acid
  VARIANT 609..612: note = Any amino acid
  VARIANT 622: note = Any amino acid
  VARIANT 627..628: note = Any amino acid
  VARIANT 630: note = Any amino acid
  VARIANT 637: note = Any amino acid
  VARIANT 650: note = Any amino acid
  VARIANT 670: note = Any amino acid
  VARIANT 679..680: note = Any amino acid
  VARIANT 684: note = Any amino acid
  VARIANT 686: note = Any amino acid
  VARIANT 698: note = Any amino acid
  VARIANT 700: note = Any amino acid
  VARIANT 710: note = Any amino acid
  VARIANT 712: note = Any amino acid
  VARIANT 723: note = Any amino acid
  VARIANT 736: note = Any amino acid
  VARIANT 745: note = Any amino acid
  VARIANT 756: note = Any amino acid
  VARIANT 760..761: note = Any amino acid
  VARIANT 763..766: note = Any amino acid
  VARIANT 769..770: note = Any amino acid
  VARIANT 775: note = Any amino acid
  VARIANT 782..784: note = Any amino acid
  VARIANT 793: note = Any amino acid
  VARIANT 803: note = Any amino acid
  VARIANT 805: note = Any amino acid
  VARIANT 810: note = Any amino acid
  VARIANT 814: note = Any amino acid
  VARIANT 817: note = Any amino acid
  VARIANT 819: note = Any amino acid
  VARIANT 821: note = Any amino acid
  VARIANT 830: note = Any amino acid
  VARIANT 832..833: note = Any amino acid
  VARIANT 836: note = Any amino acid
  VARIANT 840: note = Any amino acid
  VARIANT 842: note = Any amino acid
  VARIANT 848..850: note = Any amino acid
  VARIANT 859: note = Any amino acid
  VARIANT 863: note = Any amino acid
  VARIANT 865: note = Any amino acid
  VARIANT 867..869: note = Any amino acid
  VARIANT 871: note = Any amino acid
  VARIANT 873: note = Any amino acid
  VARIANT 885: note = Any amino acid
  VARIANT 895: note = Any amino acid
  VARIANT 899: note = Any amino acid
  VARIANT 903: note = Any amino acid
  VARIANT 905: note = Any amino acid
  VARIANT 912: note = Any amino acid
  VARIANT 922: note = Any amino acid
  VARIANT 928..931: note = Any amino acid
  VARIANT 936..937: note = Any amino acid
  VARIANT 977..979: note = Any amino acid
  VARIANT 984: note = Any amino acid
  VARIANT 986: note = Any amino acid
  VARIANT 1000: note = Any amino acid
  VARIANT 1006..1007: note = Any amino acid
  VARIANT 1036..1037: note = Any amino acid
  VARIANT 1039: note = Any amino acid
  VARIANT 1044: note = Any amino acid
  VARIANT 1053: note = Any amino acid
  VARIANT 1056: note = Any amino acid
  VARIANT 1059: note = Any amino acid
  VARIANT 1070: note = Any amino acid
  VARIANT 1072..1073: note = Any amino acid
  VARIANT 1075..1077: note = Any amino acid
  VARIANT 1088: note = Any amino acid
  VARIANT 1090: note = Any amino acid
  VARIANT 1092..1094: note = Any amino acid
  VARIANT 1096..1099: note = Any amino acid
  VARIANT 1101..1102: note = Any amino acid
  VARIANT 1107..1110: note = Any amino acid
  VARIANT 1112..1113: note = Any amino acid
  VARIANT 1115..1117: note = Any amino acid
  VARIANT 1120..1121: note = Any amino acid
  VARIANT 1126: note = Any amino acid
  VARIANT 1128: note = Any amino acid
  VARIANT 1131: note = Any amino acid
  VARIANT 1133: note = Any amino acid
  VARIANT 1135..1139: note = Any amino acid
  VARIANT 1141..1144: note = Any amino acid
  VARIANT 1149: note = Any amino acid
  VARIANT 1152: note = Any amino acid
  VARIANT 1159..1162: note = Any amino acid
  VARIANT 1164: note = Any amino acid
  VARIANT 1166..1167: note = Any amino acid
  VARIANT 1174: note = Any amino acid
  VARIANT 1176..1177: note = Any amino acid
  VARIANT 1179: note = Any amino acid
  VARIANT 1182..1186: note = Any amino acid
  VARIANT 1199: note = Any amino acid
  VARIANT 1207..1208: note = Any amino acid
  VARIANT 1213..1215: note = Any amino acid
  VARIANT 1222: note = Any amino acid
  VARIANT 1224..1225: note = Any amino acid
  VARIANT 1231: note = Any amino acid
XXXXNNFXXFIGIXSXXKTLRNELIPTXXTQEXIEKNXIXXEDELRAENXQXXKXIXDDYXRXFIXEXLSIXDIDWXXLFEAMEXXLKXXDXKXXLEKEQAEKRKXIYKKXXDDDRFKXXFXAKLISXXLPEFXXXNXXXKEEKXEAXKLFXXFATXFXXXFKNRKNXXSAXAISXSICXRIVNXNXPXFLSNXLVXXRIXKNXPXXIXKIEXELKDXLXXXSLEEIXSXXFYXXVXTQXGIDFYNDICGXXNXXMNLYCQXXKNXKXXNXXKMRKLHKQILXXRETSSEXPXKFESDEEVYXSVNXFLDNXXSKNIXERLRKXGXNXNXYXLDKIYIXXKXYXXVSQKXYGXWXTINXALEXXYXNXXXGKGKSKXXKVKKAVKXDXXKSXXEXNELVXXYXXXKAEXYIXEISXILXXXEXXELKYNPXIXLIENEEKAXEXKNXLDXIMNXFHWCXVFXXEEEVXKDNNFYAELEEIYDELXPXXSLYNXVRNYVTQKPYSTKKIKLNFGIPTLADGWSKXKEYDNNAIILXXDXXYYLGIFNAKXXXDKKIIEGSEXXGDYKKMXYNLLPGPNKMXPXVFLSSKTGXETYKPSXYILEGYXQNKXXXXSKNFDIKFCXDLIDXXKXCIAKHPXWKNFGFKFSDTSXYEDISGFYREVEKQGYKIDXTYISEKDIXXLVEXGXLYLFQIYNKDFXEXSTGKDNLHTXYXKNLFSEENLKXIVLKLNGEAELFXRKSSIKKPXIHKKGSILVNXTYKXXEXXXXIPXXIYQEXYKYFNKXXXELSDEAKKXKDKVGHKEAXHXIVKDXRYTXDKXFXHXPITINFKAXKXXINXRVLXYXAKNPDXXXIGIDRGERXLIYXSXIXXXGXIXEQKSFNIVNGYXYQEKLKQREXERDXARKXWXEIGKIKXLKEGYLSLVXHEIAKXXXXYNAIXXMEDLNYGFKRGRFKVERQVYQKFETMLINKLNYLVFKDRXXXENGGXLXGYQLTYIPESLKNXGKQCGXXFYVPAAYTSKIDPTTGFVNIFNFKDLTNXXKXKEFLXKFDSIRYDXEKXLFXFTFDYNNFKTXNXXMXXXWTVYTYGERIXRXFXXXRXXXXSXXIDPTXXXXKXXEXXXINXXDGHDXRXDIXDXEXXXXXFXXXXFEIFXLTXQMRNSLXXXXDXDXXISPVLNXNXXFXDSXXXXXKLPKDADANGAYXIALKGLYXXKQIKXXXKEDGKFXRXXLKISNXDWFDFIQNKRYL

SEQ ID NO: 847 - protein, 1306 aa, synthetic construct
  VARIANT 1..4: note = Any amino acid
  VARIANT 6..7: note = Any amino acid
  VARIANT 9..14: note = Any amino acid
  VARIANT 16..19: note = Any amino acid
  VARIANT 22..24: note = Any amino acid
  VARIANT 28..30: note = Any amino acid
  VARIANT 32..34: note = Any amino acid
  VARIANT 36..39: note = Any amino acid
  VARIANT 41..51: note = Any amino acid
  VARIANT 53..54: note = Any amino acid
  VARIANT 57..66: note = Any amino acid
  VARIANT 68..72: note = Any amino acid
  VARIANT 74..99: note = Any amino acid
  VARIANT 101..106: note = Any amino acid
  VARIANT 108: note = Any amino acid
  VARIANT 110..124: note = Any amino acid
  VARIANT 127..162: note = Any amino acid
  VARIANT 164..167: note = Any amino acid
  VARIANT 169..174: note = Any amino acid
  VARIANT 176..193: note = Any amino acid
  VARIANT 195..200: note = Any amino acid
  VARIANT 202..210: note = Any amino acid
  VARIANT 212..217: note = Any amino acid
  VARIANT 219..234: note = Any amino acid
  VARIANT 236..237: note = Any amino acid
  VARIANT 239..244: note = Any amino acid
  VARIANT 246..254: note = Any amino acid
  VARIANT 256..260: note = Any amino acid
  VARIANT 263..280: note = Any amino acid
  VARIANT 283: note = Any amino acid
  VARIANT 286: note = Any amino acid
  VARIANT 288..300: note = Any amino acid
  VARIANT 302: note = Any amino acid
  VARIANT 305..307: note = Any amino acid
  VARIANT 309..323: note = Any amino acid
  VARIANT 325..335: note = Any amino acid
  VARIANT 337..345: note = Any amino acid
  VARIANT 347..354: note = Any amino acid
  VARIANT 356..357: note = Any amino acid
  VARIANT 359..361: note = Any amino acid
  VARIANT 363..373: note = Any amino acid
  VARIANT 375: note = Any amino acid
  VARIANT 377..409: note = Any amino acid
  VARIANT 411..425: note = Any amino acid
  VARIANT 427..441: note = Any amino acid
  VARIANT 444..476: note = Any amino acid
  VARIANT 478..494: note = Any amino acid
  VARIANT 496..500: note = Any amino acid
  VARIANT 503..504: note = Any amino acid
  VARIANT 506..507: note = Any amino acid
  VARIANT 509..521: note = Any amino acid
  VARIANT 525..526: note = Any amino acid
  VARIANT 529..544: note = Any amino acid
  VARIANT 546..550: note = Any amino acid
  VARIANT 552..566: note = Any amino acid
  VARIANT 568: note = Any amino acid
  VARIANT 570: note = Any amino acid
  VARIANT 574..633: note = Any amino acid
  VARIANT 635..679: note = Any amino acid
  VARIANT 681..692: note = Any amino acid
  VARIANT 694..706: note = Any amino acid
  VARIANT 708: note = Any amino acid
  VARIANT 710..712: note = Any amino acid
  VARIANT 714..729: note = Any amino acid
  VARIANT 731..737: note = Any amino acid
  VARIANT 741: note = Any amino acid
  VARIANT 743..745: note = Any amino acid
  VARIANT 748..751: note = Any amino acid
  VARIANT 753..810: note = Any amino acid
  VARIANT 812..825: note = Any amino acid
  VARIANT 827..832: note = Any amino acid
  VARIANT 834..835: note = Any amino acid
  VARIANT 837..848: note = Any amino acid
  VARIANT 850: note = Any amino acid
  VARIANT 852..869: note = Any amino acid
  VARIANT 871..873: note = Any amino acid
  VARIANT 875..876: note = Any amino acid
  VARIANT 878..883: note = Any amino acid
  VARIANT 885..890: note = Any amino acid
  VARIANT 892..895: note = Any amino acid
  VARIANT 897..898: note = Any amino acid
  VARIANT 900: note = Any amino acid
  VARIANT 902..903: note = Any amino acid
  VARIANT 905: note = Any amino acid
  VARIANT 907..910: note = Any amino acid
  VARIANT 912..915: note = Any amino acid
  VARIANT 917..922: note = Any amino acid
  VARIANT 924..925: note = Any amino acid
  VARIANT 928..932: note = Any amino acid
  VARIANT 934..937: note = Any amino acid
  VARIANT 943..944: note = Any amino acid
  VARIANT 948..949: note = Any amino acid
  VARIANT 952..964: note = Any amino acid
  VARIANT 966..973: note = Any amino acid
  VARIANT 976..977: note = Any amino acid
  VARIANT 979..981: note = Any amino acid
  VARIANT 983..988: note = Any amino acid
  VARIANT 990: note = Any amino acid
  VARIANT 992: note = Any amino acid
  VARIANT 996..999: note = Any amino acid
  VARIANT 1001..1006: note = Any amino acid
  VARIANT 1008..1012: note = Any amino acid
  VARIANT 1015: note = Any amino acid
  VARIANT 1017..1020: note = Any amino acid
  VARIANT 1023..1028: note = Any amino acid
  VARIANT 1030..1034: note = Any amino acid
  VARIANT 1036: note = Any amino acid
  VARIANT 1038: note = Any amino acid
  VARIANT 1040..1043: note = Any amino acid
  VARIANT 1046..1049: note = Any amino acid
  VARIANT 1053..1065: note = Any amino acid
  VARIANT 1067: note = Any amino acid
  VARIANT 1073..1076: note = Any amino acid
  VARIANT 1079..1080: note = Any amino acid
  VARIANT 1084..1085: note = Any amino acid
  VARIANT 1088..1089: note = Any amino acid
  VARIANT 1093..1105: note = Any amino acid
  VARIANT 1107..1112: note = Any amino acid
  VARIANT 1115..1116: note = Any amino acid
  VARIANT 1118..1120: note = Any amino acid
  VARIANT 1122: note = Any amino acid
  VARIANT 1124..1129: note = Any amino acid
  VARIANT 1131..1133: note = Any amino acid
  VARIANT 1135..1144: note = Any amino acid
  VARIANT 1146..1150: note = Any amino acid
  VARIANT 1152..1176: note = Any amino acid
  VARIANT 1178..1184: note = Any amino acid
  VARIANT 1186..1191: note = Any amino acid
  VARIANT 1194..1204: note = Any amino acid
  VARIANT 1206..1213: note = Any amino acid
  VARIANT 1215..1219: note = Any amino acid
  VARIANT 1221..1226: note = Any amino acid
  VARIANT 1228..1253: note = Any amino acid
  VARIANT 1255: note = Any amino acid
  VARIANT 1257..1258: note = Any amino acid
  VARIANT 1260..1264: note = Any amino acid
  VARIANT 1268..1277: note = Any amino acid
  VARIANT 1279..1285: note = Any amino acid
  VARIANT 1287..1297: note = Any amino acid
  VARIANT 1299..1306: note = Any amino acid
XXXXEXXTXXXXXXKXXXXELXXXGKTXXXIXXXGXXXXDXXXXXXXXXXXKXXIDXXXXXXXXXXLXXXXXDXXXXXXXXXXXXXXXXXXXXXXXXXXLXXXXXXAXPXXXXXXXXXXXXXXXLQXXXXXXXXXXXXXXXXXXXXXXXXXXXXXXXXXXXXFXXXXIXXXXXXTXXXXXXXXXXXXXXXXXXNXXXXXXIXXXXXXXXXNXXXXXXLXXXXXXXXXXXXXXXXDXXNXXXXXXIXXXXXXXXXLXXXXXEYXXXXXXXXXXXXXXXXXXQLXKQXLXXXXXXXXXXXXXTXDEXXXVXXXXXXXXXXXXXXXLXXXXXXXXXXXGXXXXXXXXXLXXXXXXXXGXXKXXXDXXXXXXXXXXXEXLXXXXXXXXXXXXXXXXXXXXXXXXXXXXXXXXXLXXXXXXXXXXXXXXXKXXXXXXXXXXXXXXXEAXXXXXXXXXXXXXXXXXXXXXXXXXXXXXXXXXAXXXXXXXXXXXXXXXXXEXXXXXFYXXFXXIXXXXXXXXXXXXXVRNXXTKXXXXXXXXXXXXXXXXAXXXXXWXXXXXXXXXXXXXXXKXDXKYYXXXXXXXXXXXXXXXXXXXXXXXXXXXXXXXXXXXXXXXXXXXXXXXXXXXXXXXXXXXXDXXXXXXXXXXXXXXXXXXXXXXXXXXXXXXXXXXXXXXXXXXXXXIXXXXXXXXXXXXYXXXXXXXXXXXXXYXDXXXFXXXXXXXXXXXXXXXXIXXXXXXXLVDXGXXXLFXXXXKXXXXXXXXXXXXXXXXXXXXXXXXXXXXXXXXXXXXXXXXXXXXXXXXXXXXXXXXXXNXXXXXXXXXXXXXXEXXXXXXNXXSXXXXXXXXXXXXYXRXXXXXXXXXXXXXXXXXXYXXXKXXLXXXXXXNXXXXXXVXXXXNXXVXEXXQXGXXXXIXXXXRXXXXXXYXXVLXXXXXIXXXXSLNVIXXVDYXXLLXXXXXXXXXXXXXWXXXXXXXXLKXXYXXXAXXXXXXLXRXYNAXXXXEXXXXXXKXXXXXIDXQXXXXFEXXXXXXLXXXXXKXVXDXXXXGSXXXXLQLXXXXXXXXXXXXXQXGILFFXXXXYTXXIDPXXGFXXLFDXXXXXXXXXXXXXFXXXXXXSYXXDXXXFXFXXXXXXVXXXTXXXXXXXXXXWXXXXXGXXXXXXXXXXXXXXXXXXXXXXXXXKXXXXXXXIXXXXXXDLXXXXXXXXXXXDXXXXXXXXFXXXXXRXXXXXXTXXXXXXXXXXXXXXXXXXXXXXXXXXKXPXXGXXXXXYNIXXXXXXXXXXLXXXXXXXLXXXXXXXXXXXEXXXXXXXX

SEQ ID NO: 848 - protein, 1143 aa, synthetic construct
  VARIANT 1..533: note = Any amino acid
XXXXXXXXXXXXXXXXXXXXXXXXXXXXXXXXXXXXXXXXXXXXXXXXXXXXXXXXXXXXXXXXXXXXXXXXXXXXXXXXXXXXXXXXXXXXXXXXXXXXXXXXXXXXXXXXXXXXXXXXXXXXXXXXXXXXXXXXXXXXXXXXXXXXXXXXXXXXXXXXXXXXXXXXXXXXXXXXXXXXXXXXXXXXXXXXXXXXXXXXXXXXXXXXXXXXXXXXXXXXXXXXXXXXXXXXXXXXXXXXXXXXXXXXXXXXXXXXXXXXXXXXXXXXXXXXXXXXXXXXXXXXXXXXXXXXXXXXXXXXXXXXXXXXXXXXXXXXXXXXXXXXXXXXXXXXXXXXXXXXXXXXXXXXXXXXXXXXXXXXXXXXXXXXXXXXXXXXXXXXXXXXXXXXXXXXXXXXXXXXXXXXXXXXXXXXXXXXXXXXXXXXXXXXXXXXXXXXXXXXXXXXXXXXXXXXXXXXXXXXXXXXXXXXXXXXXXXXXXXXXXXXXXXXXXXXXXXXXXXXXXXXXXXXXXXXXXXXXXXXXXXXXXXXXXXXXMIYTSQSEEEKNKNYKISFKYINSAKIDEMVEKDEMYLFQIYNKDFSSYSNGNYKLNTMYWNNIFDSNNIENIIFNIAGGATIFFRAKSLERRETHKQGEVLSNKNKDNQKTTSIFSYPLIKNKRYTEDKIKLHVPIEINCNSKNLNQRKLNYRVNKNIQNLKEVNIIGISRGTNDLLYATVINSKGEIIEQTSLGKIKNVVFDKSINATREIISDYNKIIDTKEKERENANNRNKTGEELNLEKSIKDIKNGYISQAVNVIANLVKKYNAIIVFEDLNDKKSEKIESKIEKSIYRNIQNAVITKLSYLVDKKKKDKFAEGSILNGYQLTYYCEQDLVEKQEDSEEKQNGIVFYVSTYMTTNIDPKTGFVNCFSVSLPKSIDGVKDFLEKFKEIKFNTKEGYYEFVVNYENISKYTRYFIGEKLSKKEWVICSYGDRIEESKDINTGKTKYKKIDLTKEFKCLFEKFNIGQGKKLKTNIIKFLENLDLGSGLQAKIKGTNRFINKQSIQQEEFCREFMRLFALILKLQNSDGKESYIISPVKDSDGKFFDSRKHNEYSSIVPENEISNSAYNIARKGLLIINRIKKTKELERIDLNLRDEYWLNFVQNNN

SEQ ID NO: 849 - protein, 785 aa, synthetic construct
  VARIANT 1..3: note = Any amino acid
  VARIANT 25: note = Any amino acid
  VARIANT 38: note = Any amino acid
  VARIANT 50: note = Any amino acid
  VARIANT 63: note = Any amino acid
  VARIANT 65: note = Any amino acid
  VARIANT 67: note = Any amino acid
  VARIANT 72: note = Any amino acid
  VARIANT 75: note = Any amino acid
  VARIANT 83: note = Any amino acid
  VARIANT 96: note = Any amino acid
  VARIANT 98: note = Any amino acid
  VARIANT 101: note = Any amino acid
  VARIANT 127: note = Any amino acid
  VARIANT 130: note = Any amino acid
  VARIANT 134..135: note = Any amino acid
  VARIANT 137: note = Any amino acid
  VARIANT 146: note = Any amino acid
  VARIANT 163..164: note = Any amino acid
  VARIANT 171: note = Any amino acid
  VARIANT 175: note = Any amino acid
  VARIANT 197: note = Any amino acid
  VARIANT 200: note = Any amino acid
  VARIANT 206: note = Any amino acid
  VARIANT 209: note = Any amino acid
  VARIANT 212: note = Any amino acid
  VARIANT 219..221: note = Any amino acid
  VARIANT 225: note = Any amino acid
  VARIANT 227: note = Any amino acid
  VARIANT 229: note = Any amino acid
  VARIANT 232: note = Any amino acid
  VARIANT 234..235: note = Any amino acid
  VARIANT 253: note = Any amino acid
  VARIANT 258..260: note = Any amino acid
  VARIANT 267: note = Any amino acid
  VARIANT 269: note = Any amino acid
  VARIANT 273..307: note = Any amino acid
  VARIANT 319: note = Any amino acid
  VARIANT 321..322: note = Any amino acid
  VARIANT 335: note = Any amino acid
  VARIANT 337: note = Any amino acid
  VARIANT 347: note = Any amino acid
  VARIANT 350: note = Any amino acid
  VARIANT 358: note = Any amino acid
  VARIANT 374..375: note = Any amino acid
  VARIANT 381: note = Any amino acid
  VARIANT 385: note = Any amino acid
  VARIANT 387: note = Any amino acid
  VARIANT 389..390: note = Any amino acid
  VARIANT 401: note = Any amino acid
  VARIANT 403: note = Any amino acid
  VARIANT 413: note = Any amino acid
  VARIANT 418: note = Any amino acid
  VARIANT 432: note = Any amino acid
  VARIANT 437: note = Any amino acid
  VARIANT 447..448: note = Any amino acid
  VARIANT 450: note = Any amino acid
  VARIANT 452: note = Any amino acid
  VARIANT 462: note = Any amino acid
  VARIANT 472: note = Any amino acid
  VARIANT 477: note = Any amino acid
  VARIANT 479: note = Any amino acid
  VARIANT 494..496: note = Any amino acid
  VARIANT 498: note = Any amino acid
  VARIANT 502: note = Any amino acid
  VARIANT 512: note = Any amino acid
  VARIANT 525: note = Any amino acid
  VARIANT 549: note = Any amino acid
  VARIANT 576: note = Any amino acid
  VARIANT 586: note = Any amino acid
  VARIANT 603: note = Any amino acid
  VARIANT 628: note = Any amino acid
  VARIANT 632: note = Any amino acid
  VARIANT 641: note = Any amino acid
  VARIANT 650: note = Any amino acid
  VARIANT 654: note = Any amino acid
  VARIANT 656: note = Any amino acid
  VARIANT 665: note = Any amino acid
  VARIANT 676: note = Any amino acid
  VARIANT 678: note = Any amino acid
  VARIANT 680..681: note = Any amino acid
  VARIANT 684: note = Any amino acid
  VARIANT 693..694: note = Any amino acid
  VARIANT 708..711: note = Any amino acid
  VARIANT 714: note = Any amino acid
  VARIANT 731: note = Any amino acid
  VARIANT 737..739: note = Any amino acid
  VARIANT 743: note = Any amino acid
  VARIANT 745: note = Any amino acid
  VARIANT 765..766: note = Any amino acid
  VARIANT 769: note = Any amino acid
  VARIANT 773: note = Any amino acid
  VARIANT 782..783: note = Any amino acid
  VARIANT 785: note = Any amino acid
XXXMEQALSNLLYNDDAQWFKWYDXVRNYLTKKPQDDXKENKLKLNFDNXSLLGGWSDGQEKXKXAXLLKYXNEXYLCILKTXNIFDTSKENPIYXIXHSXASRLILRNLKFQTLAGKGFKGENGIXYGXMGKXXPXKAIQCLQKXIKERYVSKYPLLEEFVXXKYTDKSXFDAXITETLKQCYVCEFEPIDWNLVXEKXNNGELXLFXIHXKDYMPKXXXGKKXLXTXYWXDXXSEGSKHQLCAGAEIFMRXPVAKXXXSKLVNKXDXDGNXXXXXXXXXXXXXXXXXXXXXXXXXXXXXXXXXXXEIIKDKRFYGEXKXXFHCPIKLNYEAKXYXPKYAYPEVNXAIXESLQQSDXLQFIGIDRGEKHLVYXXTVDKDXEIIXCXDXXDNINGTDYVQXLXAVANERIIAXKNWQXIGKIKDLKSGYISXVVHRXVEEVIKDGNXXPXAXIVLEDLNTEXKRGRQKIEKXVYQNXEXALAKKLNFVVDKDAXXXEXGSVXKALQLTPPIXNYQDIEGKKQFGXMLYTRANYTSVTDPATGWRKTIYXKNGKEEDIKKQILEKFSDFGFDGRDYXFEYTEAHAGXTWRLYSGKNGKPLPRFXNKKQLQQDKNIWVPEQVNVVEILDXLFAXFDKTKSFKXQIEQGVELXKIEXRXETAWQSLRXALDLIQQIRNXGXEXXDDXFLYSPVRNXXGEHFDTRNHANNGXXXXKDXDANGAYNIARKGLIMDXHIKYWXXXGKPXKXNDLDLFISDKEWDLWLLDRXXWEXELPXFASRNAKEXXDX

SEQ ID NO: 850 - protein, 964 aa, synthetic construct
  VARIANT 1..155: note = Any amino acid
  VARIANT 158..161: note = Any amino acid
  VARIANT 164..165: note = Any amino acid
  VARIANT 168..173: note = Any amino acid
  VARIANT 176: note = Any amino acid
  VARIANT 178: note = Any amino acid
  VARIANT 181..183: note = Any amino acid
  VARIANT 186..187: note = Any amino acid
  VARIANT 189: note = Any amino acid
  VARIANT 193..195: note = Any amino acid
  VARIANT 200: note = Any amino acid
  VARIANT 202..203: note = Any amino acid
  VARIANT 206: note = Any amino acid
  VARIANT 210: note = Any amino acid
  VARIANT 213: note = Any amino acid
  VARIANT 218: note = Any amino acid
  VARIANT 227..228: note = Any amino acid
  VARIANT 230..231: note = Any amino acid
  VARIANT 234: note = Any amino acid
  VARIANT 237..238: note = Any amino acid
  VARIANT 241..242: note = Any amino acid
  VARIANT 247..251: note = Any amino acid
  VARIANT 254: note = Any amino acid
  VARIANT 257: note = Any amino acid
  VARIANT 262: note = Any amino acid
  VARIANT 272..273: note = Any amino acid
  VARIANT 276: note = Any amino acid
  VARIANT 287: note = Any amino acid
  VARIANT 293: note = Any amino acid
  VARIANT 296..299: note = Any amino acid
  VARIANT 314..315: note = Any amino acid
  VARIANT 318: note = Any amino acid
  VARIANT 320: note = Any amino acid
  VARIANT 323..324: note = Any amino acid
  VARIANT 326: note = Any amino acid
  VARIANT 328: note = Any amino acid
  VARIANT 335..336: note = Any amino acid
  VARIANT 338: note = Any amino acid
  VARIANT 347: note = Any amino acid
  VARIANT 350: note = Any amino acid
  VARIANT 352..354: note = Any amino acid
  VARIANT 357..358: note = Any amino acid
  VARIANT 360..362: note = Any amino acid
  VARIANT 364: note = Any amino acid
  VARIANT 366: note = Any amino acid
  VARIANT 368: note = Any amino acid
  VARIANT 371: note = Any amino acid
  VARIANT 375: note = Any amino acid
  VARIANT 377..378: note = Any amino acid
  VARIANT 380: note = Any amino acid
  VARIANT 382: note = Any amino acid
  VARIANT 384: note = Any amino acid
  VARIANT 386: note = Any amino acid
  VARIANT 388..396: note = Any amino acid
  VARIANT 398: note = Any amino acid
  VARIANT 400: note = Any amino acid
  VARIANT 402: note = Any amino acid
  VARIANT 406..411: note = Any amino acid
  VARIANT 413..421: note = Any amino acid
  VARIANT 425: note = Any amino acid
  VARIANT 427: note = Any amino acid
  VARIANT 429: note = Any amino acid
  VARIANT 435: note = Any amino acid
  VARIANT 439..440: note = Any amino acid
  VARIANT 453..459: note = Any amino acid
  VARIANT 471..472: note = Any amino acid
  VARIANT 487..488: note = Any amino acid
  VARIANT 492: note = Any amino acid
  VARIANT 496: note = Any amino acid
  VARIANT 498..499: note = Any amino acid
  VARIANT 501: note = Any amino acid
  VARIANT 504..506: note = Any amino acid
  VARIANT 508: note = Any amino acid
  VARIANT 510..518: note = Any amino acid
  VARIANT 522..523: note = Any amino acid
  VARIANT 525: note = Any amino acid
  VARIANT 528: note = Any amino acid
  VARIANT 534..535: note = Any amino acid
  VARIANT 537..538: note = Any amino acid
  VARIANT 542: note = Any amino acid
  VARIANT 546: note = Any amino acid
  VARIANT 551: note = Any amino acid
  VARIANT 553: note = Any amino acid
  VARIANT 556..558: note = Any amino acid
  VARIANT 563: note = Any amino acid
  VARIANT 569: note = Any amino acid
  VARIANT 577: note = Any amino acid
  VARIANT 581: note = Any amino acid
  VARIANT 584: note = Any amino acid
  VARIANT 586: note = Any amino acid
  VARIANT 590: note = Any amino acid
  VARIANT 598..599: note = Any amino acid
  VARIANT 603: note = Any amino acid
  VARIANT 605: note = Any amino acid
  VARIANT 609..610: note = Any amino acid
  VARIANT 614: note = Any amino acid
  VARIANT 617..620: note = Any amino acid
  VARIANT 626: note = Any amino acid
  VARIANT 633..634: note = Any amino acid
  VARIANT 636..638: note = Any amino acid
  VARIANT 640: note = Any amino acid
  VARIANT 642..643: note = Any amino acid
  VARIANT 658: note = Any amino acid
  VARIANT 665..667: note = Any amino acid
  VARIANT 677: note = Any amino acid
  VARIANT 680..681: note = Any amino acid
  VARIANT 686..688: note = Any amino acid
  VARIANT 693: note = Any amino acid
  VARIANT 695: note = Any amino acid
  VARIANT 699: note = Any amino acid
  VARIANT 706..707: note = Any amino acid
  VARIANT 710..711: note = Any amino acid
  VARIANT 718: note = Any amino acid
  VARIANT 722..723: note = Any amino acid
  VARIANT 730..731: note = Any amino acid
  VARIANT 733..734: note = Any amino acid
  VARIANT 736: note = Any amino acid
  VARIANT 738: note = Any amino acid
  VARIANT 744: note = Any amino acid
  VARIANT 749: note = Any amino acid
  VARIANT 753: note = Any amino acid
  VARIANT 756: note = Any amino acid
  VARIANT 759: note = Any amino acid
  VARIANT 761: note = Any amino acid
  VARIANT 767..770: note = Any amino acid
  VARIANT 774..775: note = Any amino acid
  VARIANT 781: note = Any amino acid
  VARIANT 784..786: note = Any amino acid
  VARIANT 789..790: note = Any amino acid
  VARIANT 796..798: note = Any amino acid
  VARIANT 802..803: note = Any amino acid
  VARIANT 809..811: note = Any amino acid
  VARIANT 813..816: note = Any amino acid
  VARIANT 818..821: note = Any amino acid
  VARIANT 823: note = Any amino acid
  VARIANT 826: note = Any amino acid
  VARIANT 828: note = Any amino acid
  VARIANT 832: note = Any amino acid
  VARIANT 837: note = Any amino acid
  VARIANT 842..843: note = Any amino acid
  VARIANT 845..849: note = Any amino acid
  VARIANT 851: note = Any amino acid
  VARIANT 856: note = Any amino acid
  VARIANT 858..859: note = Any amino acid
  VARIANT 861..862: note = Any amino acid
  VARIANT 872: note = Any amino acid
  VARIANT 875: note = Any amino acid
  VARIANT 878..883: note = Any amino acid
  VARIANT 885: note = Any amino acid
  VARIANT 890: note = Any amino acid
  VARIANT 892..893: note = Any amino acid
  VARIANT 896: note = Any amino acid
  VARIANT 898..899: note = Any amino acid
  VARIANT 905: note = Any amino acid
  VARIANT 907..911: note = Any amino acid
  VARIANT 927..928: note = Any amino acid
  VARIANT 931: note = Any amino acid
  VARIANT 935: note = Any amino acid
  VARIANT 937: note = Any amino acid
  VARIANT 940..947: note = Any amino acid
  VARIANT 952..955: note = Any amino acid
  VARIANT 959..960: note = Any amino acid
  VARIANT 963..964: note = Any amino acid
XXXXXXXXXXXXXXXXXXXXXXXXXXXXXXXXXXXXXXXXXXXXXXXXXXXXXXXXXXXXXXXXXXXXXXXXXXXXXXXXXXXXXXXXXXXXXXXXXXXXXXXXXXXXXXXXXXXXXXXXXXXXXXXXXXXXXXXXXXXXXXXXXXXXXXXXXXXALXXXXFYXXFLXXXXXXEKXTXGYXXXKKXXEXLITXXXKKDSXKXXIKXFADXVLXIYQMXKYFALEKKXXWXXPYXLDXXFYXXFDEGXXXXXDAXIVXYYNKXRNYLTKKPYXXEKXKLNFENGTLLXGWDKNXEKXXXXILRKNERYYLGIIKXXNKXFXDEXXQXYXDIINSGXXEXMVYKQLKDXTKXGXXXFYXXDXXXIXKXLXILXKKQXLXXYXSXQXYXEXXXXXXXXXYXSXKXFDFXXXXXXEXXXXXXXXXYKIXFXPXSEEYIXEKNXXGELYLFEIHNKDXXXXXXXKGTKNLHTLYFXXLFSQENLKHTFLKLXXGAEXFYRXKXXEXKLXXXKXVXXXXXXXXXHKRXXEXKIXFHCPIXXNXXESIXKFNXKINNXLXNNXXXNIIGXDRGEKXLAYYSVIXQKGXILXTXSLNXDINPVDYXXKLEXRXKERXXQRKXWQXXXXIKDLKXGYISQVXXKXXXLXIXXNAIIVFEDLNMRFKXIRGGIEXXXYQQLEKALIXKLXXLVFKXXXDPEEXGXLLNXYQLTAPXXSFXXMGKQTGXIFYXXASYTSKXXPXXGXRXNIYLKXEAIEXAKLXITXFIXIXWDKDKXXXXFSYXXKDFSEXKKXXXSKXXLYANAXXXVERXXWDRRYXXXNXXXXLXXXXDXTEXLXDLFXQIGIXYENGXXGXXXXXEXNENFXKXXIXXLNLIQQIRNXDSXRYXXXXXXNXDFIAXPXXPFXSXXNPYTFXNXXXXXNGDANGAYNIARKGIXXLEXIKQXKXNPXXXXXXXXDLYIXXXXWDKXXQKXX

SEQ ID NO: 851 - protein, 517 aa, synthetic construct
  VARIANT 1..8: note = Any amino acid
  VARIANT 10: note = Any amino acid
  VARIANT 12: note = Any amino acid
  VARIANT 18: note = Any amino acid
  VARIANT 23..33: note = Any amino acid
  VARIANT 35: note = Any amino acid
  VARIANT 39..40: note = Any amino acid
  VARIANT 44..46: note = Any amino acid
  VARIANT 50..52: note = Any amino acid
  VARIANT 58: note = Any amino acid
  VARIANT 61: note = Any amino acid
  VARIANT 63..66: note = Any amino acid
  VARIANT 69: note = Any amino acid
  VARIANT 73: note = Any amino acid
  VARIANT 75..78: note = Any amino acid
  VARIANT 82..83: note = Any amino acid
  VARIANT 85: note = Any amino acid
  VARIANT 89: note = Any amino acid
  VARIANT 91: note = Any amino acid
  VARIANT 103..104: note = Any amino acid
  VARIANT 106: note = Any amino acid
  VARIANT 109: note = Any amino acid
  VARIANT 112..113: note = Any amino acid
  VARIANT 120..122: note = Any amino acid
  VARIANT 126: note = Any amino acid
  VARIANT 128..130: note = Any amino acid
  VARIANT 132: note = Any amino acid
  VARIANT 134: note = Any amino acid
  VARIANT 138: note = Any amino acid
  VARIANT 141: note = Any amino acid
  VARIANT 147: note = Any amino acid
  VARIANT 152..154: note = Any amino acid
  VARIANT 156..160: note = Any amino acid
  VARIANT 162: note = Any amino acid
  VARIANT 164..166: note = Any amino acid
  VARIANT 171: note = Any amino acid
  VARIANT 177..178: note = Any amino acid
  VARIANT 181..183: note = Any amino acid
  VARIANT 186: note = Any amino acid
  VARIANT 194: note = Any amino acid
  VARIANT 198: note = Any amino acid
  VARIANT 201: note = Any amino acid
  VARIANT 205..206: note = Any amino acid
  VARIANT 210: note = Any amino acid
  VARIANT 217..218: note = Any amino acid
  VARIANT 221: note = Any amino acid
  VARIANT 225: note = Any amino acid
  VARIANT 234: note = Any amino acid
  VARIANT 236: note = Any amino acid
  VARIANT 239: note = Any amino acid
  VARIANT 244: note = Any amino acid
  VARIANT 246..248: note = Any amino acid
  VARIANT 256: note = Any amino acid
  VARIANT 258: note = Any amino acid
  VARIANT 260: note = Any amino acid
  VARIANT 263..264: note = Any amino acid
  VARIANT 267: note = Any amino acid
  VARIANT 269: note = Any amino acid
  VARIANT 274..276: note = Any amino acid
  VARIANT 279..280: note = Any amino acid
  VARIANT 284: note = Any amino acid
  VARIANT 286: note = Any amino acid
  VARIANT 290: note = Any amino acid
  VARIANT 293..294: note = Any amino acid
  VARIANT 298: note = Any amino acid
  VARIANT 302: note = Any amino acid
  VARIANT 305..307: note = Any amino acid
  VARIANT 309: note = Any amino acid
  VARIANT 311..312: note = Any amino acid
  VARIANT 315: note = Any amino acid
  VARIANT 317..320: note = Any amino acid
  VARIANT 322: note = Any amino acid
  VARIANT 324..326: note = Any amino acid
  VARIANT 329: note = Any amino acid
  VARIANT 335..337: note = Any amino acid
  VARIANT 340..348: note = Any amino acid
  VARIANT 350..354: note = Any amino acid
  VARIANT 356: note = Any amino acid
  VARIANT 358..365: note = Any amino acid
  VARIANT 367..369: note = Any amino acid
  VARIANT 371..380: note = Any amino acid
  VARIANT 382..385: note = Any amino acid
  VARIANT 390: note = Any amino acid
  VARIANT 392: note = Any amino acid
  VARIANT 399..402: note = Any amino acid
  VARIANT 404..406: note = Any amino acid
  VARIANT 410..411: note = Any amino acid
  VARIANT 413..416: note = Any amino acid
  VARIANT 418..419: note = Any amino acid
  VARIANT 421..423: note = Any amino acid
  VARIANT 425: note = Any amino acid
  VARIANT 427: note = Any amino acid
  VARIANT 431..437: note = Any amino acid
  VARIANT 440..449: note = Any amino acid
  VARIANT 452: note = Any amino acid
  VARIANT 454..459: note = Any amino acid
  VARIANT 478: note = Any amino acid
  VARIANT 482..486: note = Any amino acid
  VARIANT 488: note = Any amino acid
  VARIANT 490: note = Any amino acid
  VARIANT 492: note = Any amino acid
  VARIANT 495: note = Any amino acid
  VARIANT 498: note = Any amino acid
  VARIANT 501..502: note = Any amino acid
  VARIANT 509..510: note = Any amino acid
  VARIANT 512..517: note = Any amino acid
XXXXXXXXKXKXLFEIYXKDFSXXXXXXXXXXXEXLFSXXNTEXXXFKLXXXAEVFFXEKXDXXXXKKXEKNXKXXXXIIKXXRXTEDXIXFHLPITLNFKGXXKXINXEVXXYIQENEXXXIIGXDXXXKXLXYYGXIDXRGNIYXEKTLXXXGXXXXXGXKXXXTDYRXKLDIKXXERXXXRRXWTEIEGIXDLKXGYXSFVXXEIAXLLVQNNXXIVXEELXGGFKKDRKXIXKNXYQNLXNXXXDKLSYLVXKXKXILXXRNXLXLTPKXXXSEXXGNQXGXLFYXDAXXTSKXDPVXGFXXXLXLXXSNXKXXXXKXSXXXSIXFNEEKXXXEFXXXXXXXXXKXXXXXKXDXXXXXXXXEXXXSXXXXXXXXXXYXXXXSLTEXFXKLFQDYXXXXLXXXIVEXXKXXXXFXXDXXXLXLXLRNXXXXXXXDIXXXXXXXXXXKLXFXXXXXXKDGDANGAYNIARKGLMIXEKIXXXXXKXRXNXTIXSKXLYXXLQEWDKXXPXXXXXX

SEQ ID NO: 852 - protein, 1117 aa, synthetic construct
  VARIANT 1..357: note = Any amino acid
  VARIANT 370: note = Any amino acid
  VARIANT 399: note = Any amino acid
  VARIANT 407: note = Any amino acid
  VARIANT 410: note = Any amino acid
  VARIANT 424: note = Any amino acid
  VARIANT 442: note = Any amino acid
  VARIANT 450: note = Any amino acid
  VARIANT 456: note = Any amino acid
  VARIANT 463: note = Any amino acid
  VARIANT 465..471: note = Any amino acid
  VARIANT 483..484: note = Any amino acid
  VARIANT 486: note = Any amino acid
  VARIANT 495: note = Any amino acid
  VARIANT 499: note = Any amino acid
  VARIANT 502..503: note = Any amino acid
  VARIANT 517: note = Any amino acid
  VARIANT 525: note = Any amino acid
  VARIANT 528: note = Any amino acid
  VARIANT 539: note = Any amino acid
  VARIANT 546: note = Any amino acid
  VARIANT 550..557: note = Any amino acid
  VARIANT 559..560: note = Any amino acid
  VARIANT 563..564: note = Any amino acid
  VARIANT 567..571: note = Any amino acid
  VARIANT 574: note = Any amino acid
  VARIANT 578: note = Any amino acid
  VARIANT 581: note = Any amino acid
  VARIANT 583: note = Any amino acid
  VARIANT 588..589: note = Any amino acid
  VARIANT 591..599: note = Any amino acid
  VARIANT 601: note = Any amino acid
  VARIANT 604..605: note = Any amino acid
  VARIANT 611: note = Any amino acid
  VARIANT 619: note = Any amino acid
  VARIANT 621..623: note = Any amino acid
  VARIANT 625: note = Any amino acid
  VARIANT 629..630: note = Any amino acid
  VARIANT 634..635: note = Any amino acid
  VARIANT 637..640: note = Any amino acid
  VARIANT 642: note = Any amino acid
  VARIANT 647..649: note = Any amino acid
  VARIANT 651..653: note = Any amino acid
  VARIANT 655..657: note = Any amino acid
  VARIANT 660..663: note = Any amino acid
  VARIANT 665: note = Any amino acid
  VARIANT 668..669: note = Any amino acid
  VARIANT 671: note = Any amino acid
  VARIANT 674..675: note = Any amino acid
  VARIANT 677: note = Any amino acid
  VARIANT 680: note = Any amino acid
  VARIANT 686: note = Any amino acid
  VARIANT 690: note = Any amino acid
  VARIANT 692..695: note = Any amino acid
  VARIANT 697..699: note = Any amino acid
  VARIANT 701..705: note = Any amino acid
  VARIANT 707: note = Any amino acid
  VARIANT 709..714: note = Any amino acid
  VARIANT 716: note = Any amino acid
  VARIANT 728: note = Any amino acid
  VARIANT 730: note = Any amino acid
  VARIANT 733..734: note = Any amino acid
  VARIANT 739..745: note = Any amino acid
  VARIANT 747..750: note = Any amino acid
  VARIANT 752..768: note = Any amino acid
  VARIANT 770: note = Any amino acid
  VARIANT 773: note = Any amino acid
  VARIANT 781..784: note = Any amino acid
  VARIANT 786..788: note = Any amino acid
  VARIANT 790..794: note = Any amino acid
  VARIANT 797: note = Any amino acid
  VARIANT 800: note = Any amino acid
  VARIANT 803: note = Any amino acid
  VARIANT 806..809: note = Any amino acid
  VARIANT 811..812: note = Any amino acid
  VARIANT 815: note = Any amino acid
  VARIANT 822..823: note = Any amino acid
  VARIANT 827..829: note = Any amino acid
  VARIANT 831..835: note = Any amino acid
  VARIANT 837..838: note = Any amino acid
  VARIANT 840: note = Any amino acid
  VARIANT 844: note = Any amino acid
  VARIANT 847..848: note = Any amino acid
  VARIANT 850..851: note = Any amino acid
  VARIANT 854: note = Any amino acid
  VARIANT 858: note = Any amino acid
  VARIANT 860..861: note = Any amino acid
  VARIANT 863..864: note = Any amino acid
  VARIANT 866: note = Any amino acid
  VARIANT 869..871: note = Any amino acid
  VARIANT 873: note = Any amino acid
  VARIANT 877..879: note = Any amino acid
  VARIANT 881..886: note = Any amino acid
  VARIANT 889: note = Any amino acid
  VARIANT 892: note = Any amino acid
  VARIANT 895: note = Any amino acid
  VARIANT 902: note = Any amino acid
  VARIANT 910..911: note = Any amino acid
  VARIANT 914: note = Any amino acid
  VARIANT 917..920: note = Any amino acid
  VARIANT 922: note = Any amino acid
  VARIANT 924: note = Any amino acid
  VARIANT 929: note = Any amino acid
  VARIANT 931..932: note = Any amino acid
  VARIANT 934..935: note = Any amino acid
  VARIANT 937..941: note = Any amino acid
  VARIANT 945..947: note = Any amino acid
  VARIANT 949..950: note = Any amino acid
  VARIANT 952..960: note = Any amino acid
  VARIANT 964: note = Any amino acid
  VARIANT 967: note = Any amino acid
  VARIANT 969..976: note = Any amino acid
  VARIANT 978..980: note = Any amino acid
  VARIANT 982..984: note = Any amino acid
  VARIANT 986..990: note = Any amino acid
  VARIANT 992..994: note = Any amino acid
  VARIANT 996: note = Any amino acid
  VARIANT 999..1000: note = Any amino acid
  VARIANT 1002: note = Any amino acid
  VARIANT 1006..1007: note = Any amino acid
  VARIANT 1010..1012: note = Any amino acid
  VARIANT 1014..1018: note = Any amino acid
  VARIANT 1020..1021: note = Any amino acid
  VARIANT 1023..1117: note = Any amino acid
XXXXXXXXXXXXXXXXXXXXXXXXXXXXXXXXXXXXXXXXXXXXXXXXXXXXXXXXXXXXXXXXXXXXXXXXXXXXXXXXXXXXXXXXXXXXXXXXXXXXXXXXXXXXXXXXXXXXXXXXXXXXXXXXXXXXXXXXXXXXXXXXXXXXXXXXXXXXXXXXXXXXXXXXXXXXXXXXXXXXXXXXXXXXXXXXXXXXXXXXXXXXXXXXXXXXXXXXXXXXXXXXXXXXXXXXXXXXXXXXXXXXXXXXXXXXXXXXXXXXXXXXXXXXXXXXXXXXXXXXXXXXXXXXXXXXXXXXXXXXXXXXXXXXXXXXXXXXXXXXXXXXXXXXXXXXXXXXXXXXXXXXXXXXXXXXXXXXXTGWVDSKTEKSNXGTQFGGYLFRKKNEIGEYDYFLGISSKTXLFRKNEAXIGXDYERLDYYQPKANXIYGSAYEGENSYKEDKKXLNKVIIAXIEQIKXTNIKKSXIXXXXXXXNISDDDKVTPSXXLXKIKKVSIDXYNGXLSXXSFQSVNKEVIGNLXKTISCLKXKEXFHDLIKKDYQXFTEVQAXIDEXXXXXXXXYXXVSXXELXXXXXDKXKPLXLFXIXNKDLXXAXXXXXXXXXKXRGXXNLHTMXFKALMSGXQXXXDXGSGXXFYRXXSXXXXKXTHPAXXXIXXXNXXXKDXXXXFXYDXXKXRRXXEXKFXFHLSIXQNYXAXXXXSXXXNXXXXXYXRXXXXXXIXGIDRGERNLLYXSXIDXXGNIVXXXXXXXIXXXXNXXXXXXXXXXXXXXXXXTXYHXLLDKREKXXXXNXXXWXXXXXIKXLKXGYXSQXXXXIXXLMXKYNAIIXXEDLXXXFXXXXXKXXKXVYQXFEXXLXXKLXYLVXKXXPXXEXGGXXXAXQLAXXXTXXXXXXKQXGFXFYXPAWNTSXIDPVTGFXXLLXPKXXXXKXAXDFFGXFXXIXXNXXXXXFEFXXXYXXFXXXXXXXXXRWTXCTXGXXXXXXXXKXXXNXXXYXXXXXTXXXKXLFXXYXIDYXXGNXXXEXXXXXNXXFXXXXXXXXXXXXXXXXXXXXXXXXXXXXXXXXXXXXXXXXXXXXXXXXXXXXXXXXXXXXXXXXXXXXXXXXXXXXXXXXXXXXXXXXXXXXXXX

SEQ ID NO: 853 - protein, 1155 aa, synthetic construct
  VARIANT 1..284: note = Any amino acid
  VARIANT 289..291: note = Any amino acid
  VARIANT 293..294: note = Any amino acid
  VARIANT 296: note = Any amino acid
  VARIANT 299..300: note = Any amino acid
  VARIANT 302: note = Any amino acid
  VARIANT 305: note = Any amino acid
  VARIANT 311: note = Any amino acid
  VARIANT 313..314: note = Any amino acid
  VARIANT 323: note = Any amino acid
  VARIANT 325..327: note = Any amino acid
  VARIANT 329..330: note = Any amino acid
  VARIANT 335: note = Any amino acid
  VARIANT 339..340: note = Any amino acid
  VARIANT 342: note = Any amino acid
  VARIANT 345..347: note = Any amino acid
  VARIANT 350: note = Any amino acid
  VARIANT 353..356: note = Any amino acid
  VARIANT 359: note = Any amino acid
  VARIANT 361: note = Any amino acid
  VARIANT 363..365: note = Any amino acid
  VARIANT 368..370: note = Any amino acid
  VARIANT 373: note = Any amino acid
  VARIANT 377: note = Any amino acid
  VARIANT 383: note = Any amino acid
  VARIANT 385..389: note = Any amino acid
  VARIANT 393: note = Any amino acid
  VARIANT 396..397: note = Any amino acid
  VARIANT 399: note = Any amino acid
  VARIANT 403..407: note = Any amino acid
  VARIANT 412..413: note = Any amino acid
  VARIANT 415..416: note = Any amino acid
  VARIANT 421: note = Any amino acid
  VARIANT 429: note = Any amino acid
  VARIANT 434: note = Any amino acid
  VARIANT 436: note = Any amino acid
  VARIANT 438: note = Any amino acid
  VARIANT 442: note = Any amino acid
  VARIANT 444..447: note = Any amino acid
  VARIANT 451..453: note = Any amino acid
  VARIANT 455..459: note = Any amino acid
  VARIANT 462..463: note = Any amino acid
  VARIANT 469: note = Any amino acid
  VARIANT 473: note = Any amino acid
  VARIANT 476..480: note = Any amino acid
  VARIANT 482..483: note = Any amino acid
  VARIANT 485: note = Any amino acid
  VARIANT 489: note = Any amino acid
  VARIANT 491: note = Any amino acid
  VARIANT 496..500: note = Any amino acid
  VARIANT 502..516: note = Any amino acid
  VARIANT 518: note = Any amino acid
  VARIANT 520..524: note = Any amino acid
  VARIANT 526..527: note = Any amino acid
  VARIANT 529..536: note = Any amino acid
  VARIANT 538..544: note = Any amino acid
  VARIANT 548..561: note = Any amino acid
  VARIANT 563..564: note = Any amino acid
  VARIANT 568..569: note = Any amino acid
  VARIANT 571..572: note = Any amino acid
  VARIANT 574..576: note = Any amino acid
  VARIANT 578..582: note = Any amino acid
  VARIANT 591..593: note = Any amino acid
  VARIANT 597: note = Any amino acid
  VARIANT 599..600: note = Any amino acid
  VARIANT 603: note = Any amino acid
  VARIANT 607: note = Any amino acid
  VARIANT 609..610: note = Any amino acid
  VARIANT 612..613: note = Any amino acid
  VARIANT 616: note = Any amino acid
  VARIANT 618: note = Any amino acid
  VARIANT 620: note = Any amino acid
  VARIANT 623: note = Any amino acid
  VARIANT 625: note = Any amino acid
  VARIANT 629: note = Any amino acid
  VARIANT 636: note = Any amino acid
  VARIANT 645: note = Any amino acid
  VARIANT 652: note = Any amino acid
  VARIANT 655: note = Any amino acid
  VARIANT 657..658: note = Any amino acid
  VARIANT 664: note = Any amino acid
  VARIANT 667..672: note = Any amino acid
  VARIANT 676: note = Any amino acid
  VARIANT 679: note = Any amino acid
  VARIANT 684: note = Any amino acid
  VARIANT 688..689: note = Any amino acid
  VARIANT 692: note = Any amino acid
  VARIANT 694..696: note = Any amino acid
  VARIANT 699..702: note = Any amino acid
  VARIANT 704..706: note = Any amino acid
  VARIANT 708..711: note = Any amino acid
  VARIANT 713: note = Any amino acid
  VARIANT 715: note = Any amino acid
  VARIANT 718: note = Any amino acid
  VARIANT 739: note = Any amino acid
  VARIANT 743..744: note = Any amino acid
  VARIANT 748: note = Any amino acid
  VARIANT 750: note = Any amino acid
  VARIANT 754..755: note = Any amino acid
  VARIANT 759: note = Any amino acid
  VARIANT 772: note = Any amino acid
  VARIANT 774: note = Any amino acid
  VARIANT 777: note = Any amino acid
  VARIANT 783: note = Any amino acid
  VARIANT 791: note = Any amino acid
  VARIANT 793..796: note = Any amino acid
  VARIANT 799: note = Any amino acid
  VARIANT 804: note = Any amino acid
  VARIANT 810: note = Any amino acid
  VARIANT 812: note = Any amino acid
  VARIANT 817..818: note = Any amino acid
  VARIANT 833: note = Any amino acid
  VARIANT 840: note = Any amino acid
  VARIANT 843: note = Any amino acid
  VARIANT 845..846: note = Any amino acid
  VARIANT 848: note = Any amino acid
  VARIANT 851: note = Any amino acid
  VARIANT 858: note = Any amino acid
  VARIANT 861: note = Any amino acid
  VARIANT 877: note = Any amino acid
  VARIANT 881: note = Any amino acid
  VARIANT 885: note = Any amino acid
  VARIANT 897: note = Any amino acid
  VARIANT 900: note = Any amino acid
  VARIANT 906: note = Any amino acid
  VARIANT 919: note = Any amino acid
  VARIANT 926: note = Any amino acid
  VARIANT 936: note = Any amino acid
  VARIANT 941: note = Any amino acid
  VARIANT 943..944: note = Any amino acid
  VARIANT 952: note = Any amino acid
  VARIANT 956..957: note = Any amino acid
  VARIANT 959: note = Any amino acid
  VARIANT 967: note = Any amino acid
  VARIANT 971: note = Any amino acid
  VARIANT 977: note = Any amino acid
  VARIANT 983..984: note = Any amino acid
  VARIANT 987: note = Any amino acid
  VARIANT 991..992: note = Any amino acid
  VARIANT 997: note = Any amino acid
  VARIANT 1005: note = Any amino acid
  VARIANT 1007: note = Any amino acid
  VARIANT 1010..1011: note = Any amino acid
  VARIANT 1013: note = Any amino acid
  VARIANT 1015: note = Any amino acid
  VARIANT 1018: note = Any amino acid
  VARIANT 1022..1023: note = Any amino acid
  VARIANT 1032: note = Any amino acid
  VARIANT 1040: note = Any amino acid
  VARIANT 1044: note = Any amino acid
  VARIANT 1050: note = Any amino acid
  VARIANT 1052..1057: note = Any amino acid
  VARIANT 1061: note = Any amino acid
  VARIANT 1071: note = Any amino acid
  VARIANT 1073: note = Any amino acid
  VARIANT 1075: note = Any amino acid
  VARIANT 1078..1080: note = Any amino acid
  VARIANT 1084..1085: note = Any amino acid
  VARIANT 1087: note = Any amino acid
  VARIANT 1091: note = Any amino acid
  VARIANT 1095..1098: note = Any amino acid
  VARIANT 1105: note = Any amino acid
  VARIANT 1121..1123: note = Any amino acid
  VARIANT 1126..1128: note = Any amino acid
  VARIANT 1135: note = Any amino acid
  VARIANT 1138..1142: note = Any amino acid
  VARIANT 1146: note = Any amino acid
  VARIANT 1151..1155: note = Any amino acid
XXXXXXXXXXXXXXXXXXXXXXXXXXXXXXXXXXXXXXXXXXXXXXXXXXXXXXXXXXXXXXXXXXXXXXXXXXXXXXXXXXXXXXXXXXXXXXXXXXXXXXXXXXXXXXXXXXXXXXXXXXXXXXXXXXXXXXXXXXXXXXXXXXXXXXXXXXXXXXXXXXXXXXXXXXXXXXXXXXXXXXXXXXXXXXXXXXXXXXXXXXXXXXXXXXXXXXXXXXXXXXXXXXXXXXXXXXXXXXXXXXXXXXXXXXXXXXXXXXXXXXXXXXXXXXXXXXXXXXXXXXXXNRKKXXXSXXSXSIXXIXEYXKEFYTXKXXTDEKSVIDXFXXXGXXENGTXLFEXXEXAYXXXKDXLNXXXXGNXRXEXXXDEXXXIKXLLDXLKKLQXFXXXXXGSGXESXXDXAFYXXXXXLMEVXXEXXPLYNXVRNYLTQXPYSEXKXKXNFEXSXXXXGWDXXXEXXXXXVIXXKDGLYXLAIXNKXXXXXLXXDXIKSXGXCYEKXXXXXIXXXXXXXXXXXXXXXFXRXXXXXFXXAXXXXXXXXCXXXXXXXEGKXXXXXXXXXXXXXXLXXLIDXXKXXFXXXEXXXXXYKDFGFKWXXXSEYXSXXEFXNDIXRXXYXXKFXRXSXSYXNXLVKXGKIYLFXIYNKDFSPXSKGTPNXHTXYXXALFSEXNLXXXXXXLNGXAEXFYRKXSLEXXAKXMXXXHHXXXXKXXXNXXXXYXIXKDXRYTEDKYFLHVPITLNFKAVXDNKXXIKVXEXIKEXXIEHXIGIDRGERNLLYXSXIDXKGNIVXQLSLNEIXNXXXXEMXDYHAXLDKREXEXDEARXXWQTIEGIKNLKEGYXSQVVHIXSKXMXXYXAIXVLEDLNXGFXRSRQKVEKQVYQKFEXMLIXKLNXLVDKKKPVSEAXGLXNAYQLXDEYKGFQKVGKQXGFLFYVXAWNTSKIDPXTGFVXLXXAKYENIDXAKKXXSXFDEIRYNXEKDXFEFVIXDYSKFXXKAXGTQXXWTLCXFGDRIVTXRXNNXXGXWXHKXVKLXXEFKNLFDQXNIDYTKSXLKEXILSQNXAXXXXXXLDLXGLMLQMRNSXPXTXEDXXXSPVXXDXGEFXDSRXXXXEDNLPIXADANGAYNIARKGLWXXXQIXXXDNLEKVXLAXXXXXWLCXAQQKXXXXX

SEQ ID NO: 854 - protein, 1204 aa, synthetic construct
  VARIANT 2..3: note = Any amino acid
  VARIANT 10: note = Any amino acid
  VARIANT 19: note = Any amino acid
  VARIANT 21: note = Any amino acid
  VARIANT 25: note = Any amino acid
  VARIANT 31: note = Any amino acid
  VARIANT 35..36: note = Any amino acid
  VARIANT 57: note = Any amino acid
  VARIANT 61..62: note = Any amino acid
  VARIANT 64..65: note = Any amino acid
  VARIANT 67: note = Any amino acid
  VARIANT 69..72: note = Any amino acid
  VARIANT 77..78: note = Any amino acid
  VARIANT 81..82: note = Any amino acid
  VARIANT 84: note = Any amino acid
  VARIANT 86..88: note = Any amino acid
  VARIANT 90: note = Any amino acid
  VARIANT 92: note = Any amino acid
  VARIANT 94: note = Any amino acid
  VARIANT 96: note = Any amino acid
  VARIANT 104..105: note = Any amino acid
  VARIANT 110..111: note = Any amino acid
  VARIANT 115: note = Any amino acid
  VARIANT 121: note = Any amino acid
  VARIANT 125..126: note = Any amino acid
  VARIANT 129..134: note = Any amino acid
  VARIANT 137: note = Any amino acid
  VARIANT 140: note = Any amino acid
  VARIANT 147: note = Any amino acid
  VARIANT 183..184: note = Any amino acid
  VARIANT 186: note = Any amino acid
  VARIANT 190..191: note = Any amino acid
  VARIANT 195: note = Any amino acid
  VARIANT 197..198: note = Any amino acid
  VARIANT 201..204: note = Any amino acid
  VARIANT 206..207: note = Any amino acid
  VARIANT 209: note = Any amino acid
  VARIANT 211: note = Any amino acid
  VARIANT 215: note = Any amino acid
  VARIANT 219..222: note = Any amino acid
  VARIANT 229: note = Any amino acid
  VARIANT 238: note = Any amino acid
  VARIANT 240..242: note = Any amino acid
  VARIANT 247: note = Any amino acid
  VARIANT 252: note = Any amino acid
  VARIANT 262: note = Any amino acid
  VARIANT 271: note = Any amino acid
  VARIANT 281: note = Any amino acid
  VARIANT 289: note = Any amino acid
  VARIANT 292: note = Any amino acid
  VARIANT 296: note = Any amino acid
  VARIANT 299: note = Any amino acid
  VARIANT 301: note = Any amino acid
  VARIANT 303..304: note = Any amino acid
  VARIANT 306..308: note = Any amino acid
  VARIANT 310: note = Any amino acid
  VARIANT 313..314: note = Any amino acid
  VARIANT 316..317: note = Any amino acid
  VARIANT 321: note = Any amino acid
  VARIANT 324: note = Any amino acid
  VARIANT 326: note = Any amino acid
  VARIANT 338: note = Any amino acid
  VARIANT 341: note = Any amino acid
  VARIANT 343: note = Any amino acid
  VARIANT 346..347: note = Any amino acid
  VARIANT 351..353: note = Any amino acid
  VARIANT 355..356: note = Any amino acid
  VARIANT 359..360: note = Any amino acid
  VARIANT 362: note = Any amino acid
  VARIANT 370: note = Any amino acid
  VARIANT 373..374: note = Any amino acid
  VARIANT 380: note = Any amino acid
  VARIANT 382: note = Any amino acid
  VARIANT 384..387: note = Any amino acid
  VARIANT 401..403: note = Any amino acid
  VARIANT 420..421: note = Any amino acid
  VARIANT 424..425: note = Any amino acid
  VARIANT 429..430: note = Any amino acid
  VARIANT 437: note = Any amino acid
  VARIANT 449: note = Any amino acid
  VARIANT 456: note = Any amino acid
  VARIANT 462: note = Any amino acid
  VARIANT 466..467: note = Any amino acid
  VARIANT 476..478: note = Any amino acid
  VARIANT 481: note = Any amino acid
  VARIANT 485..486: note = Any amino acid
  VARIANT 497: note = Any amino acid
  VARIANT 522: note = Any amino acid
  VARIANT 526: note = Any amino acid
  VARIANT 542: note = Any amino acid
  VARIANT 550..559: note = Any amino acid
  VARIANT 562: note = Any amino acid
  VARIANT 586: note = Any amino acid
  VARIANT 590: note = Any amino acid
  VARIANT 593: note = Any amino acid
  VARIANT 597: note = Any amino acid
  VARIANT 600..601: note = Any amino acid
  VARIANT 604..605: note = Any amino acid
  VARIANT 611..612: note = Any amino acid
  VARIANT 614: note = Any amino acid
  VARIANT 616: note = Any amino acid
  VARIANT 620: note = Any amino acid
  VARIANT 622: note = Any amino acid
  VARIANT 627: note = Any amino acid
  VARIANT 630: note = Any amino acid
  VARIANT 636..637: note = Any amino acid
  VARIANT 646: note = Any amino acid
  VARIANT 651: note = Any amino acid
  VARIANT 668..669: note = Any amino acid
  VARIANT 680: note = Any amino acid
  VARIANT 704: note = Any amino acid
  VARIANT 719..720: note = Any amino acid
  VARIANT 733: note = Any amino acid
  VARIANT 736: note = Any amino acid
  VARIANT 740: note = Any amino acid
  VARIANT 747: note = Any amino acid
  VARIANT 754..755: note = Any amino acid
  VARIANT 759: note = Any amino acid
  VARIANT 767: note = Any amino acid
  VARIANT 771: note = Any amino acid
  VARIANT 786: note = Any amino acid
  VARIANT 788: note = Any amino acid
  VARIANT 791: note = Any amino acid
  VARIANT 793..794: note = Any amino acid
  VARIANT 799: note = Any amino acid
  VARIANT 801..802: note = Any amino acid
  VARIANT 804: note = Any amino acid
  VARIANT 806..808: note = Any amino acid
  VARIANT 827: note = Any amino acid
  VARIANT 835..836: note = Any amino acid
  VARIANT 839: note = Any amino acid
  VARIANT 844: note = Any amino acid
  VARIANT 848: note = Any amino acid
  VARIANT 861: note = Any amino acid
  VARIANT 863: note = Any amino acid
  VARIANT 868: note = Any amino acid
  VARIANT 872: note = Any amino acid
  VARIANT 892: note = Any amino acid
  VARIANT 898: note = Any amino acid
  VARIANT 901: note = Any amino acid
  VARIANT 922: note = Any amino acid
  VARIANT 928: note = Any amino acid
  VARIANT 941..942: note = Any amino acid
  VARIANT 945..946: note = Any amino acid
  VARIANT 968..969: note = Any amino acid
  VARIANT 998: note = Any amino acid
  VARIANT 1004: note = Any amino acid
  VARIANT 1006: note = Any amino acid
  VARIANT 1009: note = Any amino acid
  VARIANT 1016: note = Any amino acid
  VARIANT 1022: note = Any amino acid
  VARIANT 1025: note = Any amino acid
  VARIANT 1030: note = Any amino acid
  VARIANT 1046: note = Any amino acid
  VARIANT 1052: note = Any amino acid
  VARIANT 1066: note = Any amino acid
  VARIANT 1070: note = Any amino acid
  VARIANT 1073: note = Any amino acid
  VARIANT 1081: note = Any amino acid
  VARIANT 1084: note = Any amino acid
  VARIANT 1099..1100: note = Any amino acid
  VARIANT 1103..1105: note = Any amino acid
  VARIANT 1108: note = Any amino acid
  VARIANT 1114: note = Any amino acid
  VARIANT 1117: note = Any amino acid
  VARIANT 1126..1128: note = Any amino acid
  VARIANT 1133: note = Any amino acid
  VARIANT 1138: note = Any amino acid
  VARIANT 1142: note = Any amino acid
  VARIANT 1144: note = Any amino acid
  VARIANT 1148..1150: note = Any amino acid
  VARIANT 1173: note = Any amino acid
  VARIANT 1175..1178: note = Any amino acid
  VARIANT 1180: note = Any amino acid
  VARIANT 1188: note = Any amino acid
  VARIANT 1198: note = Any amino acid
FXXFTNLYPXSKTLRFELXPXGKTXENIEKXGILXXDEHRAESYKKVKKIIDEYHKXFIDXXLXXFXLXXXXLEEYXXLYXXKXEXXXKXFXKXQXNLRKQIVXXLTKDXXYKIXKKELIXEDLXXFVXXXXXXLIXEFXDFTTYFXGFHENRKNMYSAEEKSTAIAYRLIHENLPKFIDNMXXFXKIAXXVAEXFXXIYXXXXEXXNXIXEMFXLDYXXXXLTQKQIXVYNAIIGGXTXXXKKIKXINEYXNLYNQQQKDXRLPKLKPLXKQILSDREAXSWLPEEFXSDXEMLXAIXEXYXXLXXXKXLLXXLXXYDLXGIXIXNDLQLTDISQKXFGXWXVIXXAIKXXXPXXKEXXEXYEERISKXFKXXKSFSIXYXNXXXXIEDYFATLGAVNTXXXQKENLFAQIENAYTDAXXLLXXYPTXXNLSQDKXNVAKIKALLDAXKDLQHFXKPLLGXGDEXXKDERFYGEXXXLWXELDXXTPLYNKVRNYXTRKPYSTEKIKLNFDNSQLLGGWDXNKEXDNTSVILRKDGLYYLXIMDKKSNXXXXXXXXXXDGXCYEKMDYKLLPGANKMLPKVFFSXSRIXEFXPSEXLLXXYKXXTHKKGXXFXLXDCHXLXDFFKXSIXKHEDWXXFGFKFSDTXTYEDXSGFYREVEQQGYKLSFXXVSVSYIDQLVXEGKLYLFQIYNKDFSEYSKGTPNXHTLYWKMLFDERNLXXVVYKLNGQAEVFXRKXSIKXPTHPANXPIKNKNXXNKKXESTFEYDXIKDXRYTVDKFQFHVPITXNXKAXGXXNINPXVXXYXRXXXDTHIIGIDRGERHLLYLSXIDLKGNIXXQFXLNEIXNEYXGNTYKTNYHDLLXKXEGERXEARXSWQTIENIKELKEGYLSQVXHKISKXMVXYNAIVVLEDLNMGFMRGRQKXEKQVYXKFEKMLIDKLNYXXDKXXDADEPGGLLHAYQLTNKFESFXXLGKQSGFLFYIPAWNTSKIDPVTGFVNLXDTRYEXVXKAXSFFSKFXSIRYNXEKXWFEFXFDYNDFTTKAEGTRTXWTLCTXGTRIETFRNPEKNXQWDXEEXNLTDEFKXLFXKYGIDINGNLKEAIXXQTXXXFFXELLHLXKLXLQMRNSITXXXVDYLXSPVAXENGXFXDSRXXXLPENADANGAYNIARKGLWVIRXIXXXXDXEKLKLAIXNKEWLQFAQXKPYLND

SEQ ID NO: 855 - protein, 1233 aa, synthetic construct
  VARIANT 1..2: note = Any amino acid
  VARIANT 7..8: note = Any amino acid
  VARIANT 11: note = Any amino acid
  VARIANT 13: note = Any amino acid
  VARIANT 18: note = Any amino acid
  VARIANT 21: note = Any amino acid
  VARIANT 29..30: note = Any amino acid
  VARIANT 33..34: note = Any amino acid
  VARIANT 36..37: note = Any amino acid
  VARIANT 44..45: note = Any amino acid
  VARIANT 49: note = Any amino acid
  VARIANT 51: note = Any amino acid
  VARIANT 59: note = Any amino acid
  VARIANT 61..62: note = Any amino acid
  VARIANT 64..65: note = Any amino acid
  VARIANT 70..71: note = Any amino acid
  VARIANT 74: note = Any amino acid
  VARIANT 80: note = Any amino acid
  VARIANT 84..85: note = Any amino acid
  VARIANT 91: note = Any amino acid
  VARIANT 94..95: note = Any amino acid
  VARIANT 106: note = Any amino acid
  VARIANT 108..109: note = Any amino acid
  VARIANT 112..113: note = Any amino acid
  VARIANT 126..127: note = Any amino acid
  VARIANT 130..131: note = Any amino acid
  VARIANT 194: note = Any amino acid
  VARIANT 198: note = Any amino acid
  VARIANT 200: note = Any amino acid
  VARIANT 203..204: note = Any amino acid
  VARIANT 206: note = Any amino acid
  VARIANT 209: note = Any amino acid
  VARIANT 216: note = Any amino acid
  VARIANT 218: note = Any amino acid
  VARIANT 231: note = Any amino acid
  VARIANT 237: note = Any amino acid
  VARIANT 240: note = Any amino acid
  VARIANT 253: note = Any amino acid
  VARIANT 256: note = Any amino acid
  VARIANT 266: note = Any amino acid
  VARIANT 268: note = Any amino acid
  VARIANT 270..271: note = Any amino acid
  VARIANT 273: note = Any amino acid
  VARIANT 275: note = Any amino acid
  VARIANT 278: note = Any amino acid
  VARIANT 289: note = Any amino acid
  VARIANT 295: note = Any amino acid
  VARIANT 299: note = Any amino acid
  VARIANT 308: note = Any amino acid
  VARIANT 314..316: note = Any amino acid
  VARIANT 329: note = Any amino acid
  VARIANT 333..334: note = Any amino acid
  VARIANT 341: note = Any amino acid
  VARIANT 345: note = Any amino acid
  VARIANT 350: note = Any amino acid
  VARIANT 362: note = Any amino acid
  VARIANT 368: note = Any amino acid
  VARIANT 376..377: note = Any amino acid
  VARIANT 395: note = Any amino acid
  VARIANT 398: note = Any amino acid
  VARIANT 400: note = Any amino acid
  VARIANT 402..403: note = Any amino acid
  VARIANT 409: note = Any amino acid
  VARIANT 412: note = Any amino acid
  VARIANT 414..415: note = Any amino acid
  VARIANT 418: note = Any amino acid
  VARIANT 424: note = Any amino acid
  VARIANT 427: note = Any amino acid
  VARIANT 430: note = Any amino acid
  VARIANT 432: note = Any amino acid
  VARIANT 434..435: note = Any amino acid
  VARIANT 438: note = Any amino acid
  VARIANT 442: note = Any amino acid
  VARIANT 445..447: note = Any amino acid
  VARIANT 449: note = Any amino acid
  VARIANT 451: note = Any amino acid
  VARIANT 453: note = Any amino acid
  VARIANT 461: note = Any amino acid
  VARIANT 471: note = Any amino acid
  VARIANT 474: note = Any amino acid
  VARIANT 487..488: note = Any amino acid
  VARIANT 491: note = Any amino acid
  VARIANT 504..505: note = Any amino acid
  VARIANT 507: note = Any amino acid
  VARIANT 513: note = Any amino acid
  VARIANT 521: note = Any amino acid
  VARIANT 524: note = Any amino acid
  VARIANT 538: note = Any amino acid
  VARIANT 540: note = Any amino acid
  VARIANT 548: note = Any amino acid
  VARIANT 551: note = Any amino acid
  VARIANT 556: note = Any amino acid
  VARIANT 566: note = Any amino acid
  VARIANT 571: note = Any amino acid
  VARIANT 574: note = Any amino acid
  VARIANT 578..580: note = Any amino acid
  VARIANT 582..583: note = Any amino acid
  VARIANT 609: note = Any amino acid
  VARIANT 611..614: note = Any amino acid
  VARIANT 616: note = Any amino acid
  VARIANT 623: note = Any amino acid
  VARIANT 625: note = Any amino acid
  VARIANT 627: note = Any amino acid
  VARIANT 635: note = Any amino acid
  VARIANT 637..638: note = Any amino acid
  VARIANT 647: note = Any amino acid
  VARIANT 655: note = Any amino acid
  VARIANT 657: note = Any amino acid
  VARIANT 660..662: note = Any amino acid
  VARIANT 669: note = Any amino acid
  VARIANT 680: note = Any amino acid
  VARIANT 683: note = Any amino acid
  VARIANT 689..691: note = Any amino acid
  VARIANT 697: note = Any amino acid
  VARIANT 703: note = Any amino acid
  VARIANT 707: note = Any amino acid
  VARIANT 712: note = Any amino acid
  VARIANT 719..720: note = Any amino acid
  VARIANT 730: note = Any amino acid
  VARIANT 743: note = Any amino acid
  VARIANT 751: note = Any amino acid
  VARIANT 763: note = Any amino acid
  VARIANT 767: note = Any amino acid
  VARIANT 770: note = Any amino acid
  VARIANT 772: note = Any amino acid
  VARIANT 785: note = Any amino acid
  VARIANT 792..793: note = Any amino acid
  VARIANT 796: note = Any amino acid
  VARIANT 798: note = Any amino acid
  VARIANT 807: note = Any amino acid
  VARIANT 818..820: note = Any amino acid
  VARIANT 827: note = Any amino acid
  VARIANT 833: note = Any amino acid
  VARIANT 837: note = Any amino acid
  VARIANT 848: note = Any amino acid
  VARIANT 850: note = Any amino acid
  VARIANT 853: note = Any amino acid
  VARIANT 858: note = Any amino acid
  VARIANT 860: note = Any amino acid
  VARIANT 873: note = Any amino acid
  VARIANT 880: note = Any amino acid
  VARIANT 883..884: note = Any amino acid
  VARIANT 887..888: note = Any amino acid
  VARIANT 895: note = Any amino acid
  VARIANT 897: note = Any amino acid
  VARIANT 904: note = Any amino acid
  VARIANT 916: note = Any amino acid
  VARIANT 919: note = Any amino acid
  VARIANT 922: note = Any amino acid
  VARIANT 932: note = Any amino acid
  VARIANT 947: note = Any amino acid
  VARIANT 966: note = Any amino acid
  VARIANT 993: note = Any amino acid
  VARIANT 995: note = Any amino acid
  VARIANT 999: note = Any amino acid
  VARIANT 1001: note = Any amino acid
  VARIANT 1007: note = Any amino acid
  VARIANT 1016: note = Any amino acid
  VARIANT 1020..1021: note = Any amino acid
  VARIANT 1029..1030: note = Any amino acid
  VARIANT 1036: note = Any amino acid
  VARIANT 1042: note = Any amino acid
  VARIANT 1048: note = Any amino acid
  VARIANT 1051: note = Any amino acid
  VARIANT 1066: note = Any amino acid
  VARIANT 1074: note = Any amino acid
  VARIANT 1083: note = Any amino acid
  VARIANT 1088: note = Any amino acid
  VARIANT 1096: note = Any amino acid
  VARIANT 1098: note = Any amino acid
  VARIANT 1103: note = Any amino acid
  VARIANT 1114: note = Any amino acid
  VARIANT 1116: note = Any amino acid
  VARIANT 1118: note = Any amino acid
  VARIANT 1121: note = Any amino acid
  VARIANT 1123..1124: note = Any amino acid
  VARIANT 1128: note = Any amino acid
  VARIANT 1131: note = Any amino acid
  VARIANT 1137..1138: note = Any amino acid
  VARIANT 1151: note = Any amino acid
  VARIANT 1156: note = Any amino acid
  VARIANT 1159..1160: note = Any amino acid
  VARIANT 1165: note = Any amino acid
  VARIANT 1177: note = Any amino acid
  VARIANT 1180: note = Any amino acid
  VARIANT 1184: note = Any amino acid
  VARIANT 1205: note = Any amino acid
  VARIANT 1208: note = Any amino acid
  VARIANT 1213: note = Any amino acid
  VARIANT 1222: note = Any amino acid
  VARIANT 1227..1228: note = Any amino acid
  VARIANT 1232..1233: note = Any amino acid
XXKKIDXXTNXYXVSKTXRFXLIPVGKTXXNFXXKXXLEEDEKXXEDYXKXKEIIDRYXRXXIXXVLSKXXLDXLKDYAXLYYXXNTDADXKKXXECESKLRKEIXKXXKNXXEYNKLFNKKLIEXXLPXXLKNEDEKEVVASFKNFTTYFTGFFTNRKNMYSDEEKSTAIAYRCINENLPKFLDNVKAFEKAXSKLXKXAIXXLXETXSGLCGTXLXDVFTVDYFNFVLXQSGIDXYNXIIGGYTTSDGTKXKGXNEYINLYNQXVXKXXKXPXLKXLYKQILSESEXVSFIPXKFEXDNELLSAVXEFYANXXXLKKAIDETKLLFXNLDXXSLNGIYXKNDXSVTNXSNSMFGSWSVIXDLWNKXYDSVNSNXXIKDIEKYEDKRKKAYKKXKSXSXSXXQVLISXSNXEXXKSXVDYYKXSLXELXDXIXXKYXEAKXLFXXXYXNXKXLKNDDKAXELIKNFLDSXKEXEKFIKPLSGTGKXXEKXELFYGEFTPLLDXXSXIDSLYXKVRNYVTXKPXSTDKIKLNFGNPQXLXGWDRNKEXDYXAVLLXKDGKYYLAIXDKSNXKIXENIXXXDXXSDCYEKIIYKLLPGPNKMLPKVFFSXKXXXXFXPSDEILXIXKXGTFKKGDXFXXDDCHKLIDXYKESFKKXPXWSXXXFKFKDTXEYNDISEFYNXVAXQGYKIXXXKIPTSXIDKLVXEGKXYLFQXYNKDFSXXSKGTPNLHTXYFKMLFDERNLEXVVYKLNGXAEMFYRPASIKXDKIXHPXNXPIKNKNPLNDKKXSTFPYDXXKDXRXTKDQFSLHXPITMNFKAPDXXXINDDVRXLLKSCXNNYXIGIDRGERNLXYXSVXDSNGXIXEQHSLNIIINEYXGKTYETXYHXXLDXXEKERDEXRXNWKTIEXIKELKEGYISQXVHXICXLVVKYDAIIXMEDLNFGFKRGRTKXEKQVYQKFEKMLIDKLNYXVDKKLDPEEEGGLLKAYQLTNKFESFXKXGKQXGXIFYVPXWLTSKIDPXTGFXXLLYPKYEXXDKAKDXISRFDXIRYNAXEDXFEFDIDYDKFPRTAXDYRKKWTXCTNGERIEXFRNPXKNNEWDYXTXILTEXFKELFDNYSIXYXDXDDXKXXILSXTKXKFFEDXXKLLRLTLQMRNSXPGTDXDYXXSPVKXKNGNFYDSSKYXEKXKLPXDADANGAYNIARKGLWIIEQXKKXDDVLXKEKLAISNXEWLEXXQKNXX

SEQ ID NO: 856 - protein, 1277 aa, synthetic construct
  VARIANT 1: note = Any amino acid
  VARIANT 3: note = Any amino acid
  VARIANT 8..10: note = Any amino acid
  VARIANT 12: note = Any amino acid
  VARIANT 22: note = Any amino acid
  VARIANT 24: note = Any amino acid
  VARIANT 30: note = Any amino acid
  VARIANT 32: note = Any amino acid
  VARIANT 36..37: note = Any amino acid
  VARIANT 48: note = Any amino acid
  VARIANT 54: note = Any amino acid
  VARIANT 56: note = Any amino acid
  VARIANT 59: note = Any amino acid
  VARIANT 65: note = Any amino acid
  VARIANT 68..71: note = Any amino acid
  VARIANT 74: note = Any amino acid
  VARIANT 78..79: note = Any amino acid
  VARIANT 89..90: note = Any amino acid
  VARIANT 96..97: note = Any amino acid
  VARIANT 99: note = Any amino acid
  VARIANT 103: note = Any amino acid
  VARIANT 105: note = Any amino acid
  VARIANT 107: note = Any amino acid
  VARIANT 111: note = Any amino acid
  VARIANT 113..114: note = Any amino acid
  VARIANT 118..119: note = Any amino acid
  VARIANT 121..126: note = Any amino acid
  VARIANT 130..131: note = Any amino acid
  VARIANT 133: note = Any amino acid
  VARIANT 135..136: note = Any amino acid
  VARIANT 138: note = Any amino acid
  VARIANT 140..141: note = Any amino acid
  VARIANT 147..149: note = Any amino acid
  VARIANT 160..161: note = Any amino acid
  VARIANT 163: note = Any amino acid
  VARIANT 179: note = Any amino acid
  VARIANT 182: note = Any amino acid
  VARIANT 185: note = Any amino acid
  VARIANT 190..193: note = Any amino acid
  VARIANT 197: note = Any amino acid
  VARIANT 199..200: note = Any amino acid
  VARIANT 203: note = Any amino acid
  VARIANT 205: note = Any amino acid
  VARIANT 208: note = Any amino acid
  VARIANT 210: note = Any amino acid
  VARIANT 212: note = Any amino acid
  VARIANT 216: note = Any amino acid
  VARIANT 218: note = Any amino acid
  VARIANT 220: note = Any amino acid
  VARIANT 222..227: note = Any amino acid
  VARIANT 229..231: note = Any amino acid
  VARIANT 233: note = Any amino acid
  VARIANT 235: note = Any amino acid
  VARIANT 237: note = Any amino acid
  VARIANT 240..243: note = Any amino acid
  VARIANT 246: note = Any amino acid
  VARIANT 248: note = Any amino acid
  VARIANT 254..255: note = Any amino acid
  VARIANT 263: note = Any amino acid
  VARIANT 267..269: note = Any amino acid
  VARIANT 271: note = Any amino acid
  VARIANT 277: note = Any amino acid
  VARIANT 282: note = Any amino acid
  VARIANT 286: note = Any amino acid
  VARIANT 290: note = Any amino acid
  VARIANT 294..296: note = Any amino acid
  VARIANT 307: note = Any amino acid
  VARIANT 311..312: note = Any amino acid
  VARIANT 316: note = Any amino acid
  VARIANT 324: note = Any amino acid
  VARIANT 326: note = Any amino acid
  VARIANT 331..333: note = Any amino acid
  VARIANT 335: note = Any amino acid
  VARIANT 338: note = Any amino acid
  VARIANT 341: note = Any amino acid
  VARIANT 344: note = Any amino acid
  VARIANT 348..349: note = Any amino acid
  VARIANT 351: note = Any amino acid
  VARIANT 353..354: note = Any amino acid
  VARIANT 361: note = Any amino acid
  VARIANT 365..366: note = Any amino acid
  VARIANT 369: note = Any amino acid
  VARIANT 375: note = Any amino acid
  VARIANT 377..378: note = Any amino acid
  VARIANT 380: note = Any amino acid
  VARIANT 382: note = Any amino acid
  VARIANT 384: note = Any amino acid
  VARIANT 388..389: note = Any amino acid
  VARIANT 397..399: note = Any amino acid
  VARIANT 401: note = Any amino acid
  VARIANT 406..410: note = Any amino acid
  VARIANT 413..414: note = Any amino acid
  VARIANT 419: note = Any amino acid
  VARIANT 423: note = Any amino acid
  VARIANT 425: note = Any amino acid
  VARIANT 429: note = Any amino acid
  VARIANT 431: note = Any amino acid
  VARIANT 433..434: note = Any amino acid
  VARIANT 439..447: note = Any amino acid
  VARIANT 449: note = Any amino acid
  VARIANT 451: note = Any amino acid
  VARIANT 457..461: note = Any amino acid
  VARIANT 463: note = Any amino acid
  VARIANT 470..471: note = Any amino acid
  VARIANT 478: note = Any amino acid
  VARIANT 480..481: note = Any amino acid
  VARIANT 483: note = Any amino acid
  VARIANT 488: note = Any amino acid
  VARIANT 492..493: note = Any amino acid
  VARIANT 496: note = Any amino acid
  VARIANT 504: note = Any amino acid
  VARIANT 506: note = Any amino acid
  VARIANT 513: note = Any amino acid
  VARIANT 515: note = Any amino acid
  VARIANT 517..521: note = Any amino acid
  VARIANT 525: note = Any amino acid
  VARIANT 529: note = Any amino acid
  VARIANT 533: note = Any amino acid
  VARIANT 543: note = Any amino acid
  VARIANT 553: note = Any amino acid
  VARIANT 555..556: note = Any amino acid
  VARIANT 560: note = Any amino acid
  VARIANT 562: note = Any amino acid
  VARIANT 565: note = Any amino acid
  VARIANT 570: note = Any amino acid
  VARIANT 572: note = Any amino acid
  VARIANT 575: note = Any amino acid
  VARIANT 587..592: note = Any amino acid
  VARIANT 595: note = Any amino acid
  VARIANT 600..603: note = Any amino acid
  VARIANT 605..607: note = Any amino acid
  VARIANT 609: note = Any amino acid
  VARIANT 613: note = Any amino acid
  VARIANT 619: note = Any amino acid
  VARIANT 621: note = Any amino acid
  VARIANT 623: note = Any amino acid
  VARIANT 631: note = Any amino acid
  VARIANT 641..643: note = Any amino acid
  VARIANT 645: note = Any amino acid
  VARIANT 652..662: note = Any amino acid
  VARIANT 664..665: note = Any amino acid
  VARIANT 667..669: note = Any amino acid
  VARIANT 671..672: note = Any amino acid
  VARIANT 674: note = Any amino acid
  VARIANT 677..678: note = Any amino acid
  VARIANT 681: note = Any amino acid
  VARIANT 683: note = Any amino acid
  VARIANT 687: note = Any amino acid
  VARIANT 689: note = Any amino acid
  VARIANT 692: note = Any amino acid
  VARIANT 697: note = Any amino acid
  VARIANT 699..700: note = Any amino acid
  VARIANT 704: note = Any amino acid
  VARIANT 707: note = Any amino acid
  VARIANT 712..716: note = Any amino acid
  VARIANT 728..729: note = Any amino acid
  VARIANT 731..732: note = Any amino acid
  VARIANT 734..736: note = Any amino acid
  VARIANT 740: note = Any amino acid
  VARIANT 743: note = Any amino acid
  VARIANT 759..762: note = Any amino acid
  VARIANT 764: note = Any amino acid
  VARIANT 772: note = Any amino acid
  VARIANT 777: note = Any amino acid
  VARIANT 783..785: note = Any amino acid
  VARIANT 794: note = Any amino acid
  VARIANT 799: note = Any amino acid
  VARIANT 801..807: note = Any amino acid
  VARIANT 809: note = Any amino acid
  VARIANT 811: note = Any amino acid
  VARIANT 813..815: note = Any amino acid
  VARIANT 819: note = Any amino acid
  VARIANT 825..830: note = Any amino acid
  VARIANT 833: note = Any amino acid
  VARIANT 839: note = Any amino acid
  VARIANT 841: note = Any amino acid
  VARIANT 845..846: note = Any amino acid
  VARIANT 848: note = Any amino acid
  VARIANT 855..857: note = Any amino acid
  VARIANT 859..863: note = Any amino acid
  VARIANT 866..868: note = Any amino acid
  VARIANT 870..875: note = Any amino acid
  VARIANT 877: note = Any amino acid
  VARIANT 880..883: note = Any amino acid
  VARIANT 892: note = Any amino acid
  VARIANT 894: note = Any amino acid
  VARIANT 896..899: note = Any amino acid
  VARIANT 902: note = Any amino acid
  VARIANT 904..905: note = Any amino acid
  VARIANT 907..909: note = Any amino acid
  VARIANT 911: note = Any amino acid
  VARIANT 914: note = Any amino acid
  VARIANT 916: note = Any amino acid
  VARIANT 918..925: note = Any amino acid
  VARIANT 928..929: note = Any amino acid
  VARIANT 931..933: note = Any amino acid
  VARIANT 935..936: note = Any amino acid
  VARIANT 938..939: note = Any amino acid
  VARIANT 942..943: note = Any amino acid
  VARIANT 945..946: note = Any amino acid
  VARIANT 948..949: note = Any amino acid
  VARIANT 953: note = Any amino acid
  VARIANT 955: note = Any amino acid
  VARIANT 960: note = Any amino acid
  VARIANT 964: note = Any amino acid
  VARIANT 966..967: note = Any amino acid
  VARIANT 969..971: note = Any amino acid
  VARIANT 978: note = Any amino acid
  VARIANT 996: note = Any amino acid
  VARIANT 999..1000: note = Any amino acid
  VARIANT 1002..1003: note = Any amino acid
  VARIANT 1006: note = Any amino acid
  VARIANT 1010: note = Any amino acid
  VARIANT 1013: note = Any amino acid
  VARIANT 1016..1018: note = Any amino acid
  VARIANT 1020..1021: note = Any amino acid
  VARIANT 1023..1026: note = Any amino acid
  VARIANT 1028: note = Any amino acid
  VARIANT 1032..1033: note = Any amino acid
  VARIANT 1035..1037: note = Any amino acid
  VARIANT 1040: note = Any amino acid
  VARIANT 1046..1048: note = Any amino acid
  VARIANT 1053..1054: note = Any amino acid
  VARIANT 1059: note = Any amino acid
  VARIANT 1066..1067: note = Any amino acid
  VARIANT 1069: note = Any amino acid
  VARIANT 1071: note = Any amino acid
  VARIANT 1074..1077: note = Any amino acid
  VARIANT 1080: note = Any amino acid
  VARIANT 1083: note = Any amino acid
  VARIANT 1092: note = Any amino acid
  VARIANT 1104..1105: note = Any amino acid
  VARIANT 1111..1115: note = Any amino acid
  VARIANT 1120: note = Any amino acid
  VARIANT 1122: note = Any amino acid
  VARIANT 1124..1134: note = Any amino acid
  VARIANT 1136..1138: note = Any amino acid
  VARIANT 1142..1147: note = Any amino acid
  VARIANT 1150..1151: note = Any amino acid
  VARIANT 1153: note = Any amino acid
  VARIANT 1155: note = Any amino acid
  VARIANT 1159: note = Any amino acid
  VARIANT 1161..1170: note = Any amino acid
  VARIANT 1173..1175: note = Any amino acid
  VARIANT 1178: note = Any amino acid
  VARIANT 1180..1182: note = Any amino acid
  VARIANT 1184..1185: note = Any amino acid
  VARIANT 1188: note = Any amino acid
  VARIANT 1190: note = Any amino acid
  VARIANT 1192..1193: note = Any amino acid
  VARIANT 1195: note = Any amino acid
  VARIANT 1197..1202: note = Any amino acid
  VARIANT 1204..1206: note = Any amino acid
  VARIANT 1211..1212: note = Any amino acid
  VARIANT 1215: note = Any amino acid
  VARIANT 1218..1222: note = Any amino acid
  VARIANT 1225..1228: note = Any amino acid
  VARIANT 1231: note = Any amino acid
  VARIANT 1241: note = Any amino acid
  VARIANT 1246: note = Any amino acid
  VARIANT 1251: note = Any amino acid
  VARIANT 1253..1255: note = Any amino acid
  VARIANT 1257: note = Any amino acid
  VARIANT 1260..1261: note = Any amino acid
  VARIANT 1263: note = Any amino acid
  VARIANT 1265: note = Any amino acid
  VARIANT 1267..1271: note = Any amino acid
  VARIANT 1273: note = Any amino acid
  VARIANT 1277: note = Any amino acid
XSXFQEFXXXYXLSKTLRFELXPXGKTLEXIXAKGXXLQDEKRAKDYXKVKQIXDXYHXDFIEEXLSXXXXSEXLLQXXYDVYLKKKSXXDDLQKXXKXAQDXLXKXIVKXIXXKGKXXFXXXXXXAKKXXKXDXXLXKXXKQQEDXXXDEALEIIKSFXXFXTYFTGFHENRKNMYSXEDXHTXIAYRXXXXNLPXFXXNLXIXESXKXKXPELXYXEXIXXXXXXNXXXFXLXEXFEXXXXNNXLXQSGITXXNTIIGGKXVNGXXXKXKGINEXINLYXQQIXDKSXIAKXXXLHKQILSDGEXVSFXXDKFXDDSEVCQXVXEFYRXXXHXETXFLXVQXLFAXXDXDXXKIYVKNXKSLXXLSXQVFGDXSXXGXAXDXYYTXXVAPKFNDXXXKXKTDNXXXXXEKXXFKKGXHSLXTXEQAXEXYXXHHDDXXXXXXXXXYXKXNFAAIXXXXXIXKIHNNLXXIKGFLEXEXXKXERQLXKEKXXKQXKELLDNTXNXLHFLKLXHXKXXXXXTLLXKDEXFYGXFEELYDELAXIVPLYNKVRXYXXQKPXSXEKXKLNFXNXTLXNGWDLNKEKDNXXXXXXKDXKYYLXXXXKXXXKXFDNXPNGKEXYXKXVYKLLPGXNKMLPKVFFXXXNXKYYNPSXXXXXXXXXXXNXXPXXXKXXDXFNXXDCXKXIDFXKXSIXKHPEXWXXFGFXFSXTSSYXXXXXFYREVENQGYKXXFXXIXXXYIDXLVXQGKLYLFQIYNKDFSXXXXGXPNLHTLYXKALFXERNLQXXXYKLNGEAEXFYRKXSXXXXXXXHXAXEXXXNKNXDNPKKXXXXXXYDXIKDKRXTXDKFXXHXPITMNFXXXGXXXXXFNXXXNXXXXXXAXDVXXXXIDRGERHLXYXTXXXXKGXIXXQXXXNXIGXDXMXXXXXXXXYHXXLXXXEXXRXXARXXWXXIXXIKEXKXGYLSXVVHXIXXLXXXYNAIVVXEDLNFGFKRGRFKVEKQXYQXXEXXLIXKLNXLVXKDXXXDXXGXXXXAXQLTXXFXXXKKXGKQTGXXXYVPAXXTSKIXPVTGFVXXLXPXYEXXXXSQXFFXKFDKICYNXDKGYFEFSFDYXXFGDKAXXXXXKWTIXSXGXXXXXXXXXXXNXXXDTRXXXXXXELXXLXKXYSIXYXXXXXXXXXXICXXXDKXFXXXLXXLLXTXLXXRXSXXXXXXDXXXSPVAXXNGXFFXXXXXLAXXXXPQXADANGAYHIXLKGLXLLNRXKXXXDXKKXXLXIXNXXXXXFXQNRX

SEQ ID NO: 857 - protein, 1255 aa, synthetic construct
  VARIANT 1..12: note = Any amino acid
  VARIANT 14..15: note = Any amino acid
  VARIANT 29: note = Any amino acid
  VARIANT 34: note = Any amino acid
  VARIANT 36..38: note = Any amino acid
  VARIANT 40..42: note = Any amino acid
  VARIANT 44..47: note = Any amino acid
  VARIANT 49..52: note = Any amino acid
  VARIANT 55..57: note = Any amino acid
  VARIANT 59: note = Any amino acid
  VARIANT 63: note = Any amino acid
  VARIANT 68: note = Any amino acid
  VARIANT 70: note = Any amino acid
  VARIANT 72..80: note = Any amino acid
  VARIANT 82..86: note = Any amino acid
  VARIANT 89..98: note = Any amino acid
  VARIANT 100: note = Any amino acid
  VARIANT 103: note = Any amino acid
  VARIANT 105..107: note = Any amino acid
  VARIANT 111: note = Any amino acid
  VARIANT 114..115: note = Any amino acid
  VARIANT 119..121: note = Any amino acid
  VARIANT 123..124: note = Any amino acid
  VARIANT 127: note = Any amino acid
  VARIANT 130: note = Any amino acid
  VARIANT 134: note = Any amino acid
  VARIANT 136..141: note = Any amino acid
  VARIANT 143: note = Any amino acid
  VARIANT 145..151: note = Any amino acid
  VARIANT 153: note = Any amino acid
  VARIANT 162: note = Any amino acid
  VARIANT 167: note = Any amino acid
  VARIANT 172: note = Any amino acid
  VARIANT 174: note = Any amino acid
  VARIANT 176: note = Any amino acid
  VARIANT 185..186: note = Any amino acid
  VARIANT 190..193: note = Any amino acid
  VARIANT 195: note = Any amino acid
  VARIANT 197: note = Any amino acid
  VARIANT 199..207: note = Any amino acid
  VARIANT 213..216: note = Any amino acid
  VARIANT 218..222: note = Any amino acid
  VARIANT 224..243: note = Any amino acid
  VARIANT 245..246: note = Any amino acid
  VARIANT 248..249: note = Any amino acid
  VARIANT 252..253: note = Any amino acid
  VARIANT 255: note = Any amino acid
  VARIANT 257..260: note = Any amino acid
  VARIANT 262..263: note = Any amino acid
  VARIANT 265: note = Any amino acid
  VARIANT 268: note = Any amino acid
  VARIANT 271..272: note = Any amino acid
  VARIANT 275..276: note = Any amino acid
  VARIANT 279: note = Any amino acid
  VARIANT 281..283: note = Any amino acid
  VARIANT 286: note = Any amino acid
  VARIANT 288: note = Any amino acid
  VARIANT 290: note = Any amino acid
  VARIANT 297..298: note = Any amino acid
  VARIANT 300: note = Any amino acid
  VARIANT 303..308: note = Any amino acid
  VARIANT 311: note = Any amino acid
  VARIANT 313..315: note = Any amino acid
  VARIANT 318..328: note = Any amino acid
  VARIANT 330..332: note = Any amino acid
  VARIANT 334..341: note = Any amino acid
  VARIANT 343..345: note = Any amino acid
  VARIANT 347: note = Any amino acid
  VARIANT 349..350: note = Any amino acid
  VARIANT 352..354: note = Any amino acid
  VARIANT 357: note = Any amino acid
  VARIANT 361..362: note = Any amino acid
  VARIANT 364..366: note = Any amino acid
  VARIANT 371..384: note = Any amino acid
  VARIANT 389: note = Any amino acid
  VARIANT 392..394: note = Any amino acid
  VARIANT 397: note = Any amino acid
  VARIANT 399: note = Any amino acid
  VARIANT 401: note = Any amino acid
  VARIANT 403: note = Any amino acid
  VARIANT 406: note = Any amino acid
  VARIANT 409..410: note = Any amino acid
  VARIANT 413..415: note = Any amino acid
  VARIANT 417: note = Any amino acid
  VARIANT 419..433: note = Any amino acid
  VARIANT 435..436: note = Any amino acid
  VARIANT 439..452: note = Any amino acid
  VARIANT 454..459: note = Any amino acid
  VARIANT 461..466: note = Any amino acid
  VARIANT 468: note = Any amino acid
  VARIANT 470: note = Any amino acid
  VARIANT 472..475: note = Any amino acid
  VARIANT 477..478: note = Any amino acid
  VARIANT 481..482: note = Any amino acid
  VARIANT 488..489: note = Any amino acid
  VARIANT 491: note = Any amino acid
  VARIANT 493: note = Any amino acid
  VARIANT 495: note = Any amino acid
  VARIANT 497..505: note = Any amino acid
  VARIANT 507..508: note = Any amino acid
  VARIANT 511..512: note = Any amino acid
  VARIANT 514..516: note = Any amino acid
  VARIANT 518..519: note = Any amino acid
  VARIANT 521..522: note = Any amino acid
  VARIANT 524: note = Any amino acid
  VARIANT 534: note = Any amino acid
  VARIANT 536: note = Any amino acid
  VARIANT 539: note = Any amino acid
  VARIANT 544: note = Any amino acid
  VARIANT 549..551: note = Any amino acid
  VARIANT 555: note = Any amino acid
  VARIANT 559: note = Any amino acid
  VARIANT 563..564: note = Any amino acid
  VARIANT 568..569: note = Any amino acid
  VARIANT 571: note = Any amino acid
  VARIANT 574..575: note = Any amino acid
  VARIANT 577: note = Any amino acid
  VARIANT 581: note = Any amino acid
  VARIANT 583..584: note = Any amino acid
  VARIANT 586: note = Any amino acid
  VARIANT 589..597: note = Any amino acid
  VARIANT 599..600: note = Any amino acid
  VARIANT 604..605: note = Any amino acid
  VARIANT 608..609: note = Any amino acid
  VARIANT 626..627: note = Any amino acid
  VARIANT 630: note = Any amino acid
  VARIANT 635: note = Any amino acid
  VARIANT 637..644: note = Any amino acid
  VARIANT 648..649: note = Any amino acid
  VARIANT 651..654: note = Any amino acid
  VARIANT 657: note = Any amino acid
  VARIANT 660: note = Any amino acid
  VARIANT 664: note = Any amino acid
  VARIANT 667: note = Any amino acid
  VARIANT 671: note = Any amino acid
  VARIANT 674: note = Any amino acid
  VARIANT 676: note = Any amino acid
  VARIANT 678: note = Any amino acid
  VARIANT 680..681: note = Any amino acid
  VARIANT 683..684: note = Any amino acid
  VARIANT 686: note = Any amino acid
  VARIANT 690: note = Any amino acid
  VARIANT 693: note = Any amino acid
  VARIANT 697: note = Any amino acid
  VARIANT 704..706: note = Any amino acid
  VARIANT 708..710: note = Any amino acid
  VARIANT 714: note = Any amino acid
  VARIANT 720: note = Any amino acid
  VARIANT 733: note = Any amino acid
  VARIANT 738: note = Any amino acid
  VARIANT 747..749: note = Any amino acid
  VARIANT 751..753: note = Any amino acid
  VARIANT 759: note = Any amino acid
  VARIANT 765: note = Any amino acid
  VARIANT 773: note = Any amino acid
  VARIANT 776..782: note = Any amino acid
  VARIANT 785: note = Any amino acid
  VARIANT 787: note = Any amino acid
  VARIANT 789..790: note = Any amino acid
  VARIANT 793: note = Any amino acid
  VARIANT 795: note = Any amino acid
  VARIANT 797: note = Any amino acid
  VARIANT 800: note = Any amino acid
  VARIANT 802: note = Any amino acid
  VARIANT 804: note = Any amino acid
  VARIANT 807..808: note = Any amino acid
  VARIANT 811: note = Any amino acid
  VARIANT 814..815: note = Any amino acid
  VARIANT 831: note = Any amino acid
  VARIANT 835..836: note = Any amino acid
  VARIANT 838..843: note = Any amino acid
  VARIANT 845..847: note = Any amino acid
  VARIANT 849..850: note = Any amino acid
  VARIANT 861: note = Any amino acid
  VARIANT 865..866: note = Any amino acid
  VARIANT 869..871: note = Any amino acid
  VARIANT 873: note = Any amino acid
  VARIANT 878..879: note = Any amino acid
  VARIANT 882..892: note = Any amino acid
  VARIANT 894..895: note = Any amino acid
  VARIANT 903..904: note = Any amino acid
  VARIANT 908..910: note = Any amino acid
  VARIANT 913..914: note = Any amino acid
  VARIANT 916: note = Any amino acid
  VARIANT 919..920: note = Any amino acid
  VARIANT 929: note = Any amino acid
  VARIANT 933: note = Any amino acid
  VARIANT 935: note = Any amino acid
  VARIANT 937..938: note = Any amino acid
  VARIANT 940..941: note = Any amino acid
  VARIANT 954: note = Any amino acid
  VARIANT 958..959: note = Any amino acid
  VARIANT 961: note = Any amino acid
  VARIANT 963: note = Any amino acid
  VARIANT 966: note = Any amino acid
  VARIANT 969: note = Any amino acid
  VARIANT 973: note = Any amino acid
  VARIANT 976..977: note = Any amino acid
  VARIANT 980: note = Any amino acid
  VARIANT 984: note = Any amino acid
  VARIANT 986..987: note = Any amino acid
  VARIANT 989..991: note = Any amino acid
  VARIANT 993: note = Any amino acid
  VARIANT 995..996: note = Any amino acid
  VARIANT 998: note = Any amino acid
  VARIANT 1003..1012: note = Any amino acid
  VARIANT 1014: note = Any amino acid
  VARIANT 1016: note = Any amino acid
  VARIANT 1018..1020: note = Any amino acid
  VARIANT 1022: note = Any amino acid
  VARIANT 1026: note = Any amino acid
  VARIANT 1033: note = Any amino acid
  VARIANT 1041: note = Any amino acid
  VARIANT 1044..1047: note = Any amino acid
  VARIANT 1049..1052: note = Any amino acid
  VARIANT 1054..1055: note = Any amino acid
  VARIANT 1058: note = Any amino acid
  VARIANT 1061..1070: note = Any amino acid
  VARIANT 1072: note = Any amino acid
  VARIANT 1074: note = Any amino acid
  VARIANT 1076..1080: note = Any amino acid
  VARIANT 1082..1083: note = Any amino acid
  VARIANT 1085: note = Any amino acid
  VARIANT 1087..1088: note = Any amino acid
  VARIANT 1090..1092: note = Any amino acid
  VARIANT 1094: note = Any amino acid
  VARIANT 1096: note = Any amino acid
  VARIANT 1098..1100: note = Any amino acid
  VARIANT 1104..1105: note = Any amino acid
  VARIANT 1108: note = Any amino acid
  VARIANT 1112..1114: note = Any amino acid
  VARIANT 1116: note = Any amino acid
  VARIANT 1119: note = Any amino acid
  VARIANT 1122..1123: note = Any amino acid
  VARIANT 1126: note = Any amino acid
  VARIANT 1129..1140: note = Any amino acid
  VARIANT 1142..1149: note = Any amino acid
  VARIANT 1152..1154: note = Any amino acid
  VARIANT 1156..1159: note = Any amino acid
  VARIANT 1161..1162: note = Any amino acid
  VARIANT 1165: note = Any amino acid
  VARIANT 1167: note = Any amino acid
  VARIANT 1170: note = Any amino acid
  VARIANT 1174..1179: note = Any amino acid
  VARIANT 1181..1183: note = Any amino acid
  VARIANT 1189..1192: note = Any amino acid
  VARIANT 1195: note = Any amino acid
  VARIANT 1197..1199: note = Any amino acid
  VARIANT 1201..1202: note = Any amino acid
  VARIANT 1205: note = Any amino acid
  VARIANT 1217: note = Any amino acid
  VARIANT 1221: note = Any amino acid
  VARIANT 1224..1225: note = Any amino acid
  VARIANT 1228: note = Any amino acid
  VARIANT 1230: note = Any amino acid
  VARIANT 1232..1235: note = Any amino acid
  VARIANT 1238..1240: note = Any amino acid
  VARIANT 1242: note = Any amino acid
  VARIANT 1244..1245: note = Any amino acid
  VARIANT 1248: note = Any amino acid
  VARIANT 1250: note = Any amino acid
  VARIANT 1253..1255: note = Any amino acid
XXXXXXXXXXXXLXXVSKTLRFELKPIGXTKEYXEXXXIXXXDXXXXEXXXXVKXXXDXYHKXFIEEXLXDXXXXXXXXXLXXXXXLYXXXXXXXXXXKXFEXIXXXLRKXISXXFKKXXXYXXLFXKEXIKNXLXXXXXXNXEXXXXXXXFXDFTTYFTGXNQNRXNMYSXEXKXTAIAYRLIXXNLPXXXXNXKXFXXXXXXXXXIKKQIXXXXNXXXXXYXXXXXXXXXXXXXXXXXXXXQXXIXXYNXXIXGXXXXEXXKXQGXNEXXNLXXQKXKXXXPKXKXLXKQILSDXXSXSFXXXXXXNDXEXXXSIXXXXXXXXXXXLXXXEXXXXXXXXNXXXYXLXXIXXXNDXSLTXXSXXXYGDWXXXXXXXXXXXXXXYTGKXKKXXXKYXEXKXKXLKXIKXXSIXXXDXLXXXXXXXXXXXXXXXEXXKNXXXXXXXXXXXXXXEXXXXXXKXXXXXXNXLXKXXXXIXXIKXXLDSIKXXQXFXKXLXXXXXXXXXDXXFYXXLXXXYXXLXXIXPLYNKVRNYXTXKPXSTEKXKLNFXXXTLLXGWDXNKEXXNLGXXFXKDXXYXLGIXNXXNXKIXXXXXXXXXNXXYKKXXYKXXPGPNKMLPKVFFSKSRXXEFXPSEEXLXXXXXXXXKKGXXFXXXXCHXLIXFFKXSIXKHEXWSXFXFXFXXTXXYXDISXFYXEVEXQGYKITXXXIXXXYINXLVDEGXLYLFQIYNKDFSXYSKGXPNLHTLYWXXXFXXXNLKDVXYKLNGXAEIFYRKXSIXXXXXXXHPXNXPXXNKXPXNXKKXSXFXYDXXKDXRYXXDKFQFHVPITMNFKAXGENXXNXXXXXXIXXXDXXHIIGIDRGERXLLYXXVIXXXGXIVEQXXLNXXXXXXXXXXXHXXDYHELLDXXEKEXXXARXXWXTIXXIKELKEGYXSQVXHXIXXLXXKYNAIVVLEDLNXGFKXXRXKXEKXVYXKFEXMLXXKLXYLVXKXXQXXXEXGXXLXAYQLXXXXXXXXXXGXQXGXXXYXPAWXTSKIDPXTGFVNLFXTKXXXXEXXXXFXXKFXNIXXXXXXXXXXFXFXYXXXXXKXXGXRXXWXXXSXGXRXXXFRNXXKNXEWDXXXVXLTXEFXXLFXRYXXXXXXXXXXXXSXXXXXXXXAVXXXDXXXXFXXLFXLXVQXRNSXXXXXXDXXXSPVKNXXXXFYXSXXXSXXLPXDADANGAYNIAXKGLXLVXXIKXSXKXXXXKIXXXIXNXXWLXFXQEXXX

SEQ ID NO: 858 - DNA, 18 bp, synthetic construct
  source 1..18: mol_type = other DNA
taatacgactcactatag

SEQ ID NO: 859 - DNA, 26 bp, synthetic construct
  source 1..26: mol_type = other DNA
gggcgtttcggatcccatccatgggg

SEQ ID NO: 860 - DNA, 56 bp, synthetic construct
  source 1..56: mol_type = other DNA
gtcaaaagacctttttaatttctactcttgtagatgcctgggcgtttcggatccca

SEQ ID NO: 861 - DNA, 64 bp, synthetic construct
  source 1..64: mol_type = other DNA
gtctaagaactttaaataatttctactgttgtagatgggcgtttcggatcccatccatggggtc

SEQ ID NO: 862 - DNA, 62 bp, synthetic construct
  source 1..62: mol_type = other DNA
gttaagtaatatagaataatttctactgttgtagatgggcgtttcggatcccatccatgggg

SEQ ID NO: 863 - DNA, 64 bp, synthetic construct
  source 1..64: mol_type = other DNA
gtctataagacgaactaaatttctactattgtagatgggcgtttcggatcccatccatggggtc

SEQ ID NO: 864 - DNA, 63 bp, synthetic construct
  source 1..63: mol_type = other DNA
gtctaacgaccttttaaatttctactgtttgtagatgggcgtttcggatcccatccatggggt

SEQ ID NO: 865 - DNA, 62 bp, synthetic construct
  source 1..62: mol_type = other DNA
atctacaacagtagaaatttaattagtaggtcaaacgggcgtttcggatcccatccatgggg

SEQ ID NO: 866 - DNA, 62 bp, synthetic construct
  source 1..62: mol_type = other DNA
atctacaacagtagaaatttagtatgaagttcaaacgggcgtttcggatcccatccatgggg

SEQ ID NO: 867 - DNA, 55 bp, Homo sapiens
  source 1..55: mol_type = genomic DNA
gacgcactctctgagatattttcgcctgggcgtttcggatcccatccatggggtc

SEQ ID NO: 868 - DNA, 55 bp, synthetic construct
  source 1..55: mol_type = other DNA
  misc_difference 14..23: note = a, c, t, g, unknown, or other
gacgcactctctgnnnnnnnnnngcctgggcgtttcggatcccatccatggggtc

SEQ ID NO: 869 - DNA, 55 bp, synthetic construct
  source 1..55: mol_type = other DNA
  misc_difference 16..23: note = a, c, t, g, unknown, or other
gacgcactctctgagnnnnnnnngcctgggcgtttcggatcccatccatggggtc

SEQ ID NO: 870 - DNA, 55 bp, synthetic construct
  source 1..55: mol_type = other DNA
  misc_difference 18..23: note = a, c, t, g, unknown, or other
gacgcactctctgagatnnnnnngcctgggcgtttcggatcccatccatggggtc

SEQ ID NO: 871 - DNA, 23 bp, Homo sapiens
  source 1..23: mol_type = genomic DNA
agagtctctcagctggtacacgg

SEQ ID NO: 872 - RNA, 20 nt, synthetic construct
  source 1..20: mol_type = other RNA
agagtctctcagctggtaca

SEQ ID NO: 873 - DNA, 21 bp, synthetic construct
  source 1..21: mol_type = other DNA
cgttaatcgcgtataatacgg

SEQ ID NO: 874 - RNA, 41 nt, synthetic construct
  source 1..41: mol_type = other RNA
taatttctactcttgtagatcgttaatcgcgtataatacgg

SEQ ID NO: 875 - DNA, 27 bp, Homo sapiens
  source 1..27: mol_type = genomic DNA
tttagagtctctcagctggtacacggc

SEQ ID NO: 876 - RNA, 43 nt, synthetic construct
  source 1..43: mol_type = other RNA
taatttctactcttgtagatgagtctctcagctggtacacggc

SEQ ID NO: 877 - DNA, 27 bp, Homo sapiens
  source 1..27: mol_type = genomic DNA
tttcatccatccgacattgaagttgac

SEQ ID NO: 878 - RNA, 43 nt, synthetic construct
  source 1..43: mol_type = other RNA
taatttctactcttgtagatatccatccgacattgaagttgac

SEQ ID NO: 879 - DNA, 27 bp, Homo sapiens
  source 1..27: mol_type = genomic DNA
tttcccgatattcctcaggtactccaa

SEQ ID NO: 880 - RNA, 43 nt, synthetic construct
  source 1..43: mol_type = other RNA
taatttctactcttgtagatccgatattcctcaggtactccaa

SEQ ID NO: 881 - DNA, 27 bp, Homo sapiens
  source 1..27: mol_type = genomic DNA
tttactcacgtcatccagcagagaatg

SEQ ID NO: 882 - RNA, 43 nt, synthetic construct
  source 1..43: mol_type = other RNA
taatttctactcttgtagatctcacgtcatccagcagagaatg

SEQ ID NO: 883 - DNA, 28 bp, Homo sapiens
  source 1..28: mol_type = genomic DNA
tttccctcccgaccccgcactcacccgc

SEQ ID NO: 884 - RNA, 44 nt, synthetic construct
  source 1..44: mol_type = other RNA
taatttctactcttgtagatcctcccgaccccgcactcacccgc

SEQ ID NO: 885 - DNA, 28 bp, Homo sapiens
  source 1..28: mol_type = genomic DNA
tttcttcacatccgtgtcccggcccggc

SEQ ID NO: 886 - RNA, 44 nt, synthetic construct
  source 1..44: mol_type = other RNA
taatttctactcttgtagatttcacatccgtgtcccggcccggc

SEQ ID NO: 887 - DNA, 28 bp, Homo sapiens
  source 1..28: mol_type = genomic DNA
tttcccagagccgtcttcccagcccacc

SEQ ID NO: 888 - RNA, 44 nt, synthetic construct
  source 1..44: mol_type = other RNA
taatttctactcttgtagatccagagccgtcttcccagcccacc
